(19) United States
(12) Patent Application Publication
(10) Pub. No.: US 2017/0313990 A1
(43) Pub. Date: Nov. 2, 2017

(54) A PROCESS FOR THE PRODUCTION OF ADENOVIRUS

(71) Applicant: PSIOXUS THERAPEUTICS LIMITED, Oxfordshire (GB)

(72) Inventors: Brian Robert CHAMPION, Abingdon, Oxfordshire (GB); Jeetendra BHATIA, Abingdon, Oxfordshire (GB); Ashvin PATEL, Abingdon, Oxfordshire (GB)

(73) Assignee: PSIOXUS THERAPEUTICS LIMITED, Oxfordshire (GB)

(21) Appl. No.: 15/506,194

(22) PCT Filed: Aug. 27, 2015
(86) PCT No.: PCT/EP2015/069706

§ 371 Date: Feb. 23, 2017

(30) Foreign Application Priority Data
Aug. 27, 2014 (GB) 1415154.2
Sep. 3, 2014 (GB) 1415581.6

(51) Int. Cl. C12N 7/00

(52) U.S. Cl. CPC C12N 7/00; C12N 2710/10021; C12N 2710/10051

(57) ABSTRACT

A Process for the Production of Adenovirus The present disclosure relates to a continuous process for the manufacture of an adenovirus wherein the process comprises the steps: A) continuously culturing, in a vessel, mammalian cells infected with the adenovirus in the presence of media suitable for supporting the cells such that the virus replicates, wherein the cells are capable of supporting viral replication, and B) isolating from the media the virus produced from step a) wherein the isolation of virus is not subsequent to a cell lysis step, wherein viable cells for virus infection and production are maintained in the vessel at a level suitable for replicating the virus for the period of continuous manufacture, wherein the process comprises at least one media change or addition and at least one cell change or addition. The disclosure also extends to viruses populations obtained or obtainable from the method.

[0001] The present disclosure relates to a method for the manufacture of certain adenoviruses, for example chimeric adenoviruses and/or replication competent adenoviruses, and/or group B viruses and the viral product obtained therefrom.

[0002] The present specification claims priority from GB1415154.2 filed 27 Aug. 2014 and GB1415581.6 filed 3 Sep. 2014 both of which are incorporated herein by reference.

### BACKGROUND

[0003] At the present time the pharmaceutical field is on the edge of realising the potential of viruses as therapeutics for human use. To date a virus derived from ONXY-15 (ONYX Pharmaceuticals and acquired by Shanghai Sunway Biotech) is approved for use in head and neck cancer in a limited number of countries. However, there are a number of viruses currently in the clinic, which should hopefully result in some of these being registered for use in humans.

[0004] A number of virus therapies are based on adenoviruses, for example EnAd (ColoAd1) is a chimeric oncolytic adenovirus (WO2005/118825) currently in clinical trials for the treatment of colorectal cancer.

[0005] These adenoviral based therapeutic agents need to be manufactured in quantities suitable for supporting both the clinical trials and demand after registration and under conditions that adhere to good manufacturing practice (GMP).

[0006] As part of the manufacturing process, the viruses are propagated in mammalian cells in vitro, for example in a cell suspension culture. The virus is recovered from these cells by cell lysis and subsequent purification. FIG. 1 is an extract from Kamen & Henry 2004 (J Gene Med. 6: pages 184-192) showing a schematic diagram of the processes involved manufacture of the GMP grade adenovirus. Notably, after viral replication, the cells are lysed.

[0007] Contaminating DNA and host cell protein (HCP) from the cells after lysis can be a significant problem and must be removed as far as possible from the final therapeutic adenoviral product. This is described in detail in the application WO2011/045381, which describes lysing the cells, fragmenting or precipitating the DNA within the cell suspension and clarifying the same, employing tangential flow. DNA digestion with DNAse is also shown as the third step in FIG. 1.

[0008] Developing a successful recombinant adenovirus process requires a detailed understanding of basic host cell line physiology and metabolism; the recombinant virus, and the interaction between the cell line and the virus. Essentially the process requires adaptation depending on the particular type of virus or viral vector.

[0009] In addition the cost of manufacturing recombinant virus suitable for clinical use is relatively high. Improved processes that increase the efficiency of manufacture, for example increase the yield of virus are required to ensure clinical demand can be met for recombinant viral products that gain regulatory approval and to reduce manufacturing costs.

[0010] Surprisingly the present inventors have established that certain adenoviruses, for example replication competent adenoviruses and chimeric oncolytic adenoviruses, and group B adenoviruses can be prepared by a continuous process that isolates the virus from the cell media and that avoids the necessity to lyse the cells and thus may significantly reduce the starting levels of DNA and HCP contamination in the viral product.

[0011] In addition the present inventors have established parameters that give them control over where the virus, for example group B virus product, is located in the culture at a given time point i.e. in the supernatant or associated with the cell pellet. This allows the processes to be adapted as required.

### SUMMARY OF THE INVENTION

[0012] Thus the present disclosure provides a continuous process for the manufacture of:

[0013] an adenovirus (for example a group B adenovirus) wherein the process comprises the steps:
[0014] a. continuously culturing, in a vessel, mammalian cells infected with the adenovirus in the presence of media suitable for supporting the cells such that the virus replicates, wherein the cells are capable of supporting viral replication, and
[0015] b. isolating from the media the virus produced from step a) wherein the isolation of virus is not subsequent to a cell lysis step,
   wherein viable cells for virus infection and production are maintained in the vessel at a level suitable for replicating the virus for the period of continuous manufacture.

[0016] Thus the present disclosure provides a continuous process for the manufacture of a virus selected from the group consisting of a replication competent adenovirus; a group B virus, an adenovirus which does not encode or does not express an adenovirus death protein, a replication capable or deficient chimeric oncolytic adenovirus having a genome comprising an E2B region, wherein said E2B region comprises a nucleic acid sequence derived from a first adenoviral serotype and a nucleic acid sequence derived from a second distinct adenoviral serotype; wherein said first and second serotypes are each selected from the adenoviral subgroups B, C, D, E, or F, and combinations of two or more of the same, wherein the process comprises the steps:
[0017] a. continuously culturing, in a vessel, mammalian cells infected with the adenovirus in the presence of media suitable for supporting the cells such that the virus replicates, wherein the cells are capable of supporting viral replication, and
[0018] b. isolating from the media the virus produced from step a) wherein the isolation of virus is not subsequent to a cell lysis step,
   wherein viable cells for virus infection and production are maintained in the vessel at a level suitable for replicating the virus for the period of continuous manufacture.
   Thus in one embodiment the present disclosure provides a continuous process for the manufacture of:
   [0019] a replication competent adenovirus; or
   [0020] a replication capable or deficient chimeric oncolytic adenovirus having a genome comprising an E2B region, wherein said E2B region comprises a nucleic acid sequence derived from a first adenoviral serotype and a nucleic acid sequence derived from a second distinct adenoviral serotype; wherein said first and second serotypes are each selected from the adenoviral subgroups B, C, D, E, or F, wherein the process comprises the steps:
[0021] a. continuously culturing, in a vessel, mammalian cells infected with the adenovirus in the presence of media suitable for supporting the cells such that the virus replicates, wherein the cells are capable of supporting viral replication, and
[0022] b. isolating from the media the virus produced from step a) wherein the isolation of virus is not subsequent to a cell lysis step,
   wherein viable cells for virus infection and production are maintained in the vessel at a level suitable for replicating the virus for the period of continuous manufacture.
[0023] In one independent aspect there is provided a continuous process for the manufacture of a type B adenovirus wherein the process comprises the steps:
[0024] a. continuously culturing, in a vessel, mammalian cells infected with the adenovirus in the presence of media suitable for supporting the cells such that the virus replicates, wherein the cells are capable of supporting viral replication, and
[0025] b. isolating from the media the virus produced from step a) wherein the isolation of virus is not subsequent to a cell lysis step,
   wherein viable cells for virus infection and production are maintained in the vessel at a level suitable for replicating the virus for the period of continuous manufacture.

[0026] In one embodiment the type B adenovirus is a chimeric oncolytic adenovirus having a genome comprising an E2B region, wherein said E2B region comprises a nucleic acid sequence derived from a first adenoviral serotype and a nucleic acid sequence derived from a second distinct adenoviral serotype; wherein said first and second serotypes are each selected from the adenoviral subgroups B, C, D, E, or F.

[0027] In one embodiment the oncolytic virus has a fibre, hexon and penton proteins from the same serotype, for example Ad11, in particular Ad11p, for example found at positions 30812-31789, 18254-21100 and 13682-15367 of the genomic sequence of the latter wherein the nucleotide positions are relative to genbank ID 217307399 (accession number: GC689208).

[0028] In one embodiment the adenovirus is enadenotucirev (also known as EnAd and formerly as EnAd). Enadenotucirev as employed herein refers the chimeric adenovirus of SEQ ID NO: 12. It is a replication competent oncolytic chimeric adenovirus which has enhanced therapeutic properties compared to wild type adenoviruses (see WO2005/118825). EnAd has a chimeric E2B region, which features DNA from Ad11p and Ad3, and deletions in E3/E4. The structural changes in enadenotucirev result in a genome that is approximately 3.5 kb smaller than Ad11p thereby providing additional “space” for the insertion of transgenes.

[0029] OvAd1 and OvAd2 are also chimeric adenoviruses similar to enadenotucirev, which also have additional “space” in the genome (see WO2008/080003). Thus in one embodiment the adenovirus is OvAd1 or OvAd2.

[0030] In one embodiment the group B adenovirus comprises a genome comprising formula (I):

5′ITR-B₁-B_{A}-B₂-B_{X}-B_{B}-B_{Y}-B₃-3′ITR (I)

wherein:
B₁ is a bond or comprises: E1A, E1B or E1A-E1B;

### B_{A} is E2B-L1-L2-L3-E2A-L4;

[0031] B₂ is a bond or comprises E3;
B_{X} is a bond or a DNA sequence comprising: a restriction site, one or more transgenes or both;
B_{B} comprises L5;
B_{Y} is a bond or a DNA sequence comprising: a restriction site, one or more transgenes or both;
B₃ is a bond or comprises E4;
wherein at least one of B_{X} and B_{Y} is not a bond, for example at least one of B_{X} and B_{Y} comprises a transgene, a restriction site or both, such as a transgene.
Thus in one embodiment there is provided a continuous process according to the present disclosure, wherein the type B adenovirus is replication competent.

[0032] A replication competent group B adenovirus comprising a sequence of formula (I):

5′ITR-B₁-B_{A}-B₂-B_{X}-B_{B}-B_{Y}-B₃-3′ITR

wherein:
[0033] B₁ is bond or comprises: E1A, E1B or E1A-E1B;
[0034] B_{A} comprises-E2B-L1-L2-L3-E2A-L4;
[0035] B₂ is a bond or comprises: E3;
[0036] B_{X} is a bond or a DNA sequence comprising: a restriction site, one or more transgenes or both;
[0037] B_{B} comprises L5;
[0038] B_{Y} comprises a transgene cassette comprising a transgene and a splice acceptor sequence; and
[0039] B₃ is a bond or comprises: E4,
   wherein the transgene cassette is under the control of an endogenous promoter selected from the group consisting of E4 and major late promoter and wherein the transgene cassette does not comprise a non-biasedly inserting transposon.

[0040] Viruses of formula (I) are disclosed in WO2015/059303 incorporated herein by reference.

[0041] In one embodiment the adenovirus is a sequence disclosed herein in the sequence listing.

[0042] In one embodiment the virus employed in the process of the present disclosure contains less than a full length adenovirus genome, for example contains 50%, 60%, 70%, 80% or more of an adenovirus genome or a sequence that hybridises to 50%, 60%, 70%, 80% or more of an adenovirus genome under stringent conditions.

[0043] In one embodiment the virus of the present disclosure has part or all of the E3 region deleted. Whilst not wishing to be bound by theory it is thought by the inventors that partial or complete deletion of this region may speed up the rate of viral replication, which in some instances may provide beneficial properties in vivo.

[0044] In one embodiment the virus employed in the present disclosure has part or all of the E4 region deleted. Whilst not wishing to be bound by theory it is thought by the inventors that the partial deletion of the E4 region may speed up the rate of viral replication, which in some instances may provide beneficial properties in vivo.

[0045] In one embodiment the virus employed in the present disclosure is partially deleted in the E4 region such that the virus retains its replication competency.

[0046] In one embodiment the virus employed in the present disclosure has part or all of the E3 region deleted and part or all of the E4 region deleted, as appropriate.

[0047] In one embodiment the adenovirus has a hexon and fibre from a group B adenovirus, for example Ad11 or EnAd.

[0048] In one embodiment there is provided is a continuous process for the manufacture of an adenovirus having a fibre and hexon of subgroup B (such as Ad11, in particular Ad11p also known as the Slobitski strain) for example wherein part or all of the E3 and/or part of all E4 region is deleted and said process comprises the steps:
[0049] a. continuously-culturing in a vessel mammalian cells infected with the adenovirus in the presence of media suitable for supporting the cells such that the virus replicates, wherein the cells are capable of supporting viral replication, and
[0050] b. isolating from the media the virus from step a) wherein the isolation of virus is not subsequent to a cell lysis step,
   wherein viable cells for virus infection and production are maintained in the culture at a level suitable for replicating the virus for the period of continuous manufacture.

[0051] In one embodiment a virus employed the present disclosure may comprise a transgene.

[0052] In one embodiment the adenovirus of the present disclosure, such as the type B adenovirus is a replication capable or deficient.

[0053] In one embodiment the adenovirus is replication competent or replication deficient, for example replication competent. Replication deficient adenoviruses are also referred to herein as viral vectors.

[0054] In one embodiment the chimeric virus is replication competent or replication deficient, for example replication competent.

[0055] In one embodiment the virus employed in the present disclosure does not express a functional adenovirus death protein or a functional fragment thereof, in particular does not express an adenovirus death protein or a fragment thereof.

[0056] In one embodiment the virus of the present disclosure does not comprise a DNA sequence encoding a functional adenovirus death protein or a functional fragment thereof, in particular does not comprise a sequence encoding an adenovirus death protein or fragment thereof.

[0057] In one embodiment the adenovirus employed in the present disclosure is not one which infects cells via the coxsackievirus and adenovirus receptor (CAR).

[0058] In one embodiment the adenovirus employed in the present disclosure is one which infects cells via CD46, for example group B adenoviruses.

[0059] In one embodiment the virus, for example replication competent virus is not a group C virus.

[0060] In one embodiment the virus, for example replication competent virus is not Ad5.

[0061] In one embodiment the continuous manufacture period is at least two virus cycles, for example 70 to 300 hours.

[0062] In one embodiment the process comprises at least two harvesting steps.

[0063] In one embodiment the process comprises continuous harvesting of virus, which is initiated at least 24 hours, such as 30 hours or 35 hours post infection and, for example continued until the end of the process.

[0064] In one embodiment, for example at the end of the process there is a single cell lysis step, in particular to recover virus retained in the cell.

[0065] In one embodiment there process comprises combining one or more fractions virus harvested.

[0066] In one embodiment the process comprises a step of adding fresh cells to the culture on one or more occasions, for example one, two, three, four or five additions, for example independently selected at one or more time points, such as 24, 30, 35, 40, 45, 48, 50, 55, 60, 65, 70, 72, 75, 80, 85, 90, 95 or 96 hours.

[0067] In one embodiment the process comprises at least one step where fresh media is added. In one embodiment the process comprises at least one media change or addition, for example at any time point between 12 and 96 hours after infection, such as 24, 30, 35, 40, 45, 48, 50, 55, 60, 65, 70, 72, 75, 80, 85, 90, 95 or 96 hours.

[0068] In one embodiment the process comprises a step of:

adding fresh cells to the culture on one or more occasions, for example one, two, three, four or five additions, for example independently selected at one or more time points, such as 24, 30, 35, 40, 45, 48, 50, 55, 60, 65, 70, 72, 75, 80, 85, 90, 95 or 96 hours, and
adding fresh media or changing the media example at any time point between 12 and 96 hours after infection, such as 24, 30, 35, 40, 45, 48, 50, 55, 60, 65, 70, 72, 75, 80, 85, 90, 95 or 96 hours.

[0069] In one embodiment the cells are infected with a starting concentration of virus of 1-9×10⁴ vp/ml or greater, such as 1-9×10⁵, 1-9×10⁶, 1-9×10⁷, 1-9×10⁸, 1-9×10⁹ vp/ml, in particular 1 to 5×10⁷ vp/ml, including about 1×10⁶, 4 to 5×10⁶, in particular as 1×10⁶ vp/ml.

[0070] In one embodiment the multiplicity of infection (MOI) is in the range 2 to 75, for example 5, 6, 7, 8, 9, 10, 11, 12, 12.5, 13, 14, 15, 16, 17, 18, 19, 20, 21, 22, 23, 24, 25, 26, 27, 28, 29, 30, 31, 31.25, 32, 33, 35, 36, 37, 38, 39, 40, 41, 42, 43, 44, 45, 46, 47, 48, 49, 50, 51, 52, 53, 54, 55 etc, such as 12.5, 31.25 or 50. In one embodiment the multiplicity of infection is in the range 10 to 15, such as 12.5 vp/cell.

[0071] In one embodiment the MOI is in the range 2 to 50, for example 5 to 20, such as 6, 7, 8, 9, 10, 11, 12, 13, 14 or 15, such as 12.5 vp/cell

[0072] In one embodiment the seed density is 1.9×10⁶ or 4×10⁶ and the multiplicity of infection is 50.

[0073] In one embodiment the seed density in the range 1-1.9×10⁶ such as 1×10⁶ vp/ml and the multiplicity of infection in the range 10-15, such as 12.5.

[0074] In one embodiment of the present disclosure the culture employed is perfusion culture.

[0075] In one embodiment of the present disclosure the cells employed are adherent.

[0076] In one embodiment of the present disclosure the cells employed are suitable for suspension culture.

[0077] In one embodiment the culture employed in the process of the present disclosure is a suspension culture, adherent culture, perfusion culture or combinations thereof, such as suspension culture.

[0078] The continuous manufacturing processes according to the present disclosure is advantageous in that it has one or more of the following benefits: increases the efficiency of manufacturing by allowing adequate quantities of virus to be prepared for clinical use, reduces time spent in manufacturing campaigns, which in turn reduces cost of goods, and also reduces the complexity of manufacturing in that it minimises the need to prepare multiple master viral seed stocks, which may also reduce costs.

[0079] Other advantages of the process described herein include the ability for the scale of the process to be reduced due to, for example due to the increased yields.

[0080] Furthermore the present inventors have established parameters that allow the cells to produce high levels of virus per cell. In this independent aspect the culture is, for example, characterised in that it has a low multiplicity of infection in combination with a low starting seed cell density.

[0081] Thus in one independent aspect there is provided a method of infecting cells suitable for replicating adenovirus wherein the starting seed density is 2×10⁶ vp/ml or less, for example 1.5×10⁶ vp/ml or less such as 1×10⁶ vp/ml and a multiplicity of infection of 15 or less, such as 14, 13, 12.5, 12, 11 or 10, such as 12.5.

[0082] Thus in one independent aspect there is provided a method of infecting cells suitable for replicating adenovirus wherein the starting seed density is 1.9×10⁶ and a multiplicity of infection of 50 ppc.

[0083] Yields as high as 200,000 virus particles per cell at certain time points, such as about 72 hours or more may be achieved employing conditions described herein. In one embodiment the virus produced per cell at over 100,000, for example after 48, 50, 55, 60, 65 or 70 hours.

[0084] In this embodiment where the culture employs a low seed density and a low multiplicity of infection the virus can readily be harvested.

[0085] In addition there present inventors have established that by altering the parameters of the process control can be provided over where the virus is located, for example in the cell, in the supernatant or a combination thereof. This forms a further aspect of the present disclosure.

[0086] In particular low multiplicity of infection with low seed density results in the virus product located predominantly in the cell, however towards the end of the process the virus is also found in the supernatant. It also gave a very high yield per cell, especially when the media was changed.

[0087] High multiplicity of infection and high seed density also results in the majority of virus particles in the supernatant towards the end of the process.

[0088] High multiplicity of infection in combination with a low seed density provides most the virus product in the supernatant towards the end of the process.

[0089] In contrast low multiplicity of infection with high seed density gave virus in the cell, in particular when the media was not changed.

[0090] Moderate multiplicities of infection in combination with moderate seed densities provide a virus product in the supernatant and the cell, in particular when there was no media change.

[0091] Furthermore high multiplicity of infection and high seed density appears to provide virus product primarily in the supernatant, with or without a change of media.

[0092] Thus surprisingly by controlling the parameters of the process the location of the virus product can be controlled. In one embodiment there is provided a method for controlling the partitioning of a recombinant virus (in particular an adenovirus described herein) between the supernatant and a host cell, which method comprises: a) providing a host cell culture (in particular a mammalian cell, such as one described herein, in particular as a suspension culture) b) selecting a seed density, multiplicity of infection and duration of infection (duration of culture) to provide virus product in the desired location selected from the supernatant and the host cell c) determining the yield of recombinant virus in the culture supernatant and the host cell at a relevant time point and d) comparing the yield in the supernatant and the cell determined in step (c) electing to keep the seed density and multiplicity of infection selected in step b) or changing the seed density, multiplicity of infection or both to alter the partitioning of the recombinant virus between the supernatant and the cell to suit to the primary recovery of the recombinant virus.

[0093] In one embodiment the process of controlling the parameters according to the present disclosure comprises steps performed in parallel for different conditions i.e. a process where the seed density, multiplicity of infection or both are changed from the parameters employed in a first process, thereby allowing comparison of two different processes.

[0094] In one embodiment 80% or more of the recombinant virus is in the supernatant, for example 85, 86, 87, 88, 89, 90, 91, 92, 93, 94, 95, 96, 97, 98, 99 or 100% is located in the supernatant.

[0095] In one embodiment 80% or more of the recombinant virus is in the cell for example 85, 86, 87, 88, 89, 90, 91, 92, 93, 94, 95, 96, 97, 98, 99 or 100% is located in the cell, for example when a low multiplicity of infection is employed and a low seed density is employed as defined herein, over a duration of infection of 48-65 hours. A media change or addition may also help to maximise the yield.

[0096] Thus in one independent aspect there is provided a process for the manufacture of an adenovirus (for example a virus described herein such as a group B adenovirus) wherein the process comprises the steps:

[0097] a. culturing, in a vessel, mammalian cells infected with the adenovirus in the presence of media suitable for supporting the cells such that the virus replicates, wherein the cells are capable of supporting viral replication, wherein the starting seed density of the virus is in the range 1 to 2×10⁶ vp/ml (such as 1×10⁶ vp/ml) and the multiplicity of infection is in the range 5 to 20, such as 10 to 15, in particular 12.5; and

[0098] b. performing a lysis step in the period 24 to 75 hours post virus infection to harvest the virus from the cells, for example where the lysis step is performed at 65 to 70 hours post infection, such as 66, 67, 68 or 69 hours post infection.

[0099] In one embodiment the process is a GMP manufacturing process.

### DETAILED DESCRIPTION OF THE DISCLOSURE

[0100] Virus of the present disclosure is generally employed herein to refer generically to replication capable, replication competent or replication deficient adenovirus including a chimeric oncolytic adenovirus unless the context indicates otherwise.

[0101] Replication capable as employed herein refers to a replication competent virus or virus which can selectively replicate in a cell. Viruses which selectively replicate in cancer cells are those which require a gene or protein which is upregulated in a cancer cell to replicate, such as a p53 gene.

[0102] Replication competent virus as employed herein refers to a virus that is capable of replication without the assistance of a complementary cell line encoding an essential viral protein, such as that encoded by the E1 region (also referred to as a packaging cell line) and virus capable of replicating without the assistance of a helper virus.

[0103] In one embodiment the virus is replication competent.

[0104] A replication deficient virus is a vector and requires the use of a packaging cell line or helper virus to be able to replicate.

[0105] Adenovirus as employed will generally refer to a replication competent adenovirus or replication deficient, for example a group B virus, in particular Ad11, such as Ad11p, unless the context indicates otherwise. In some instances it may be employed to refer to refer only to replication competent viruses and this will be clear from the context.

[0106] In one embodiment the adenovirus is replication competent.

[0107] Adenovirus vector will generally refer to a replication deficient adenovirus.

[0108] Subgroup B (group B or type B) as employed herein refers to viruses with at least the fibre and hexon from a group B adenovirus, for example the whole capsid from a group B virus, such as substantially the whole genome from a group B virus. In one embodiment a group B virus does not encode an adenovirus death protein, for example an ADP protein of 11.64 KDaltons, such as the protein with Uniprot number P24935.

[0109] All human adenovirus genomes examined to date have the same general organisation i.e., the genes encoding specific functions are located at the same position in the viral genome (referred to herein as structural elements). Each end of the viral genome has a short sequence known as the inverted terminal repeat (or ITR), which is required for viral replication. The viral genome contains five early transcription units (E1A, E1B, E2, E3, and E4), three delayed early units (IX, IVa2 and E2 late) and one late unit (major late) that is processed to generate five families of late mRNAs (L1-L5). Proteins encoded by the early genes are primarily involved in replication and modulation of the host cell response to infection, whereas the late genes encode viral structural proteins. Early genes are prefixed by the letter E and the late genes are prefixed by the letter L.

[0110] The genome of adenoviruses is tightly packed, that is, there is little non-coding sequence, and therefore it can be difficult to find a suitable location to insert transgenes. The present inventors have identified two DNA regions where transgenes are tolerated, in particular the sites identified are suitable for accommodating complicated transgenes, such as those encoding antibodies. That is, the transgene is expressed without adversely affecting the virus' viability, native properties such as oncolytic properties or replication, that is position B_{X} and/or position B_{Y} in viruses of formula (I).

[0111] In one embodiment the adenovirus is partially or completely deleted in the E3 region.

[0112] Part of the E3 region is deleted as employed herein means that at least part, for example in the range 1 to 99% of the E3 region is deleted, such as 2, 3, 4, 5, 6, 7, 8, 9, 10, 15, 20, 25, 30, 35, 40, 45, 50, 55, 60, 65, 70, 75, 80, 85, 90, 91, 92, 93, 94 95, 96, 97 or 98% deleted.

[0113] In one embodiment the adenovirus is partially deleted in the E4 region. Viruses can be maintained as replication competent when only part of the E4 region is deleted.

[0114] Part of the E4 region is deleted as employed herein means that at least part, for example in the range 1 to 99% of the E4 region is deleted, such as 2, 3, 4, 5, 6, 7, 8, 9, 10, 15, 20, 25, 30, 35, 40, 45, 50, 55, 60, 65, 70, 75, 80, 85, 90, 91, 92, 93, 94 95, 96, 97 or 98% deleted. In adenoviruses of the present disclosure sufficient E4 should be retained to allow replication.

[0115] Chimera (or chimeric virus) as employed herein will generally refer to an adenovirus comprising genomic DNA from at least two different serotypes, for example serotypes independently selected from groups B, C, D, E and F, such as replication capable, replication competent or replication deficient chimeric oncolytic virus. In one embodiment the chimeric oncolytic adenovirus is replication competent, for example EnAd, OvAd1 or OvAd2.

[0116] In one embodiment the chimeric virus is EnAd (SEQ ID NO: 12) or a derivative thereof, for example a derivate adapted to incorporate a transgene or transgenes, examples of which are discussed below.

[0117] In one embodiment the chimera is partially or completely deleted in the E3 region.

[0118] Part of the E3 region is deleted as employed herein means that at least part, for example in the range 1 to 99% of the E3 region is deleted, such as 2, 3, 4, 5, 6, 7, 8, 9, 10, 15, 20, 25, 30, 35, 40, 45, 50, 55, 60, 65, 70, 75, 80, 85, 90, 91, 92, 93, 94 95, 96, 97 or 98% deleted.

[0119] In one embodiment the chimera is partially or completely deleted in the E4 region.

[0120] Part of the E4 region is deleted as employed herein means that at least part, for example in the range 1 to 99% of the E4 region is deleted, such as 2, 3, 4, 5, 6, 7, 8, 9, 10, 15, 20, 25, 30, 35, 40, 45, 50, 55, 60, 65, 70, 75, 80, 85, 90, 91, 92, 93, 94 95, 96, 97 or 98% deleted. In adenoviruses of the present disclosure sufficient E4 should be retained to allow replication.

[0121] Transgene as employed herein refers to a gene that has been inserted into the genome sequence, which is a gene that is unnatural to the virus (exogenous) or not normally found in that particular location in the virus. Examples of transgenes are given below. Transgene as employed herein also includes a functional fragment of the gene that is a portion of the gene which when inserted is suitable to perform the function or most of the function of the full-length gene.

[0122] Transgene and coding sequence are used interchangeably herein in the context of inserts into the viral genome, unless the context indicates otherwise. Coding sequence as employed herein means, for example a DNA sequence encoding a functional RNA, peptide, polypeptide or protein. Typically the coding sequence is cDNA for the transgene that encodes the functional RNA, peptide, polypeptide or protein of interest. Functional RNA, peptides, polypeptide and proteins of interest are described below.

[0123] Clearly the virus genome contains coding sequences of DNA. Endogenous (naturally occurring genes) in the genomic sequence of the virus are not considered a transgene, within the context of the present specification unless then have been modified by recombinant techniques such as that they are in a non-natural location or in a non-natural environment or they have a non-natural function.

[0124] In one embodiment transgene as employed herein refers to a segment of DNA containing a gene or cDNA sequence that has been isolated from one organism and is introduced into a different organism i.e. the virus of the present disclosure. In one embodiment this non-native segment of DNA may retain the ability to produce functional RNA, peptide, polypeptide or protein.

[0125] Thus in one embodiment the transgene inserted encodes a human or humanised protein, polypeptide or peptide.

[0126] In one embodiment the transgene inserted encodes a non-human protein, polypeptide or peptide (such as a non-human mammalian protein, polypeptide or peptide) or RNA molecule, for example from a mouse, rat, rabbit, camel, llama or similar. Advantageously, the viruses of the present disclosure allow the transgenes to be transported inside the cancerous cell. Thus, responses generated by the human patient to a non-human sequence (such as a protein) can be minimised by this intra-cellular deliver

[0127] A DNA sequence may comprise more than one transgene, for example, 1, 2, 3 or 4 transgenes, such as 1 or 2.

[0128] A transgene cassette may comprise more than one transgene, for example, 1, 2, 3 or 4 transgenes, such as 1 or 2.

[0129] Transgene cassette as employed herein refers to a DNA sequence encoding one or more transgenes in the form of one or more coding sequences and one or more regulatory elements.

[0130] A transgene cassette may encode one or more monocistronic and/or polycistronic mRNA sequences.

[0131] In one embodiment the transgene or transgene cassette encodes a monocistronic or polycistronic mRNA, and for example the cassette is suitable for insertion into the adenovirus genome at a location under the control of an endogenous promoter or exogenous promoter or a combination thereof.

[0132] Monocistronic mRNA as employed herein refers to an mRNA molecule encoding a single functional RNA, peptide, polypeptide or protein.

[0133] In one embodiment the transgene cassette encodes monocistronic mRNA.

[0134] In one embodiment the transgene cassette in the context of a cassette encoding monocistronic mRNA means a segment of DNA optionally containing an exogenous promoter (which is a regulatory sequence that will determine where and when the transgene is active) or a splice site (which is a regulatory sequence determining when a mRNA molecule will be cleaved by the spliceosome) a coding sequence (i.e. the transgene), usually derived from the cDNA for the protein of interest, optionally containing a polyA signal sequence and a terminator sequence.

[0135] In one embodiment the transgene cassette may encode one or more polycistronic mRNA sequences.

[0136] Polycistronic mRNA as employed herein refers to an mRNA molecule encoding two or more functional RNA, peptides or proteins or a combination thereof. In one embodiment the transgene cassette encodes a polycistronic mRNA.

[0137] In one embodiment transgene cassette in the context of a cassette encoding polycistronic mRNA includes a segment of DNA optionally containing an exogenous promoter (which is a regulatory sequence that will determine where and when the transgene is active) or a splice site (which is a regulatory sequence determining when a mRNA molecule will be cleaved by the spliceosome) two or more coding sequences (i.e. the transgenes), usually derived from the cDNA for the protein or peptide of interest, for example wherein each coding sequence is separated by either an IRES or a 2A peptide. Following the last coding sequence to be transcribed, the cassette may optionally contain a polyA sequence and a terminator sequence.

[0138] In one embodiment the transgene cassette encodes a monocistronic mRNA followed by a polycistronic mRNA. In another embodiment the transgene cassette a polycistronic mRNA followed by a monocistronic mRNA.

[0139] In one embodiment B_{X} comprises a restriction site, for example 1, 2, 3 or 4 restriction sites, such as 1 or 2. In one embodiment B_{X} comprises at least one transgene, for example 1 or 2 transgenes. In one embodiment B_{X} comprises at least one transgene, for example 1 or 2 transgenes and one or more restriction sites, for example 2 or 3 restriction sites, in particular where the restrict sites sandwich a gene or the DNA sequence comprising the genes to allow it/them to be specifically excised from the genome and/or replaced. Alternatively, the restriction sites may sandwich each gene, for example when there are two transgenes three different restriction sites are required to ensure that the genes can be selectively excised and/or replaced. In one embodiment one or more, for example all the transgenes are in the form a transgene cassette. In one embodiment B_{X} comprises SEQ ID NO: 10. In one embodiment SEQ ID NO: 10 is interrupted, for example by a transgene. In embodiment SEQ ID NO: 10 is uninterrupted. In one embodiment B_{X} does not comprise a restriction site. In one embodiment B_{X} is a bond. In one embodiment B_{X} comprises or consists of one or more transgenes.

[0140] In one embodiment B_{Y} comprises a restriction site, for example 1, 2, 3 or 4 restriction sites, such as 1 or 2. In one embodiment B_{Y} comprises at least one transgene, for example 1 or 2 transgenes. In one embodiment B_{Y} comprises at least one transgene, for example 1 or 2 transgenes and one or more restriction sites, for example 2 or 3 restriction sites, in particular where the restrict sites sandwich a gene or the DNA sequence comprising the genes to allow it/them to be specifically excised from the genome and/or replaced. Alternatively the restriction sites may sandwich each gene, for example when there are two transgenes three different restriction sites are required to ensure that the genes can be selectively excised and/or replaced. In one embodiment one or more, for example all the transgenes are in the form a transgene cassette. In one embodiment BY comprises SEQ ID NO: 11. In one embodiment SEQ ID NO: 11 is interrupted, for example by a transgene. In embodiment SEQ ID NO: 11 is uninterrupted. In one embodiment B_{Y} does not comprise a restriction site. In one embodiment B_{Y} is a bond. In one embodiment B_{Y} comprises or consists of one or more transgenes.

[0141] In one embodiment B_{X} and B_{Y} each comprises a restriction site, for example 1, 2, 3 or 4 restriction sites, such as 1 or 2. In one embodiment B_{X} and B_{Y} each comprises at least one transgene, for example 1 or 2 transgenes. In one embodiment B_{X} and B_{Y} each comprises at least one transgene, for example 1 or 2 transgenes and one or more restriction sites, for example 2 or 3 restriction sites, in particular where the restriction sites sandwich a gene or the DNA sequence comprising the genes to allow it to be specifically excised from the genome and/or replaced. Alternatively the restriction sites may sandwich each gene, for example when there are two transgenes three different restriction sites are required to ensure that the genes can be selectively excised and/or replaced. In one embodiment one or more, for example all the transgenes are in the form a transgene cassette. In one embodiment B_{X} and B_{Y} comprises SEQ ID NO: 10 and SEQ ID NO: 11 respectively. In one embodiment B_{X} and B_{Y} do not comprise a restriction site. In one embodiment B_{X} is a bond and B_{Y} is not a bond. In one embodiment BY is a bond and BX is not a bond.

[0142] In one embodiment the transgene is located in B_{X}. In one embodiment the transgene or transgene cassette is located in B_{Y}. In one embodiment a transgene or transgene cassette is located in B_{X} and B_{Y}, for example the transgenes may be the same or different, in each location.

[0143] Advantageously, the transgene in the present virus constructs is/are inserted in a location that is removed from the early genes because this reduces the likelihood of affecting virus gene expression or speed of replication.

[0144] In one independent aspect there is provided a replication competent oncolytic adenovirus of serotype 11 or virus-derivative thereof wherein the fibre, hexon and capsid are serotype 11, wherein the virus genome comprises a DNA sequence encoding a therapeutic antibody or antibody-binding fragment, said DNA sequence under the control of a promoter endogenous to the adenovirus selected from consisting of E4 and the major late promoter, such that the transgene does not interfere with virus replication, for example wherein the DNA sequence encoding the therapeutic antibody or antibody-binding fragment is under the control of the E4 promoter or alternatively under the control of the major late promoter, in particular wherein the DNA sequence encoding an antibody or antibody-binding fragment in located after L5 in the virus genome sequence (i.e. towards the 3′ end of the virus sequence). Advantageously using an endogenous promoter maximises the amount of space available for inserting transgenes.

[0145] Advantageously, when under the control of these promoters the virus remains replication competent and is also able to express the antibody as a full length antibody or a suitable binding fragment or other protein. Thus the antibody or other protein of choice will be expressed by the cancer cell. Employing an endogenous promoter may be advantageous because it reduces the size of the transgene cassette that needs to be incorporated to express the antibody, fragment or other protein, i.e. the cassette can be smaller because no exogenous promoter needs to be included.

[0146] Employing an endogenous promoter in the virus may also be advantageous in a therapeutic context because the transgene is only expressed when the virus is replicating as opposed to a constitutive exogenous promoter which will continually transcribe the transgene and may lead to an inappropriate concentration of the antibody or fragment.

[0147] In one embodiment expression of the antibody or fragment is under the control of the major late promoter.

[0148] In one embodiment the expression of the antibody or fragment is under the control of the E4 promoter.

[0149] In one independent aspect there is provided a replication competent oncolytic adenovirus of serotype 11 or virus-derivative thereof wherein the fibre, hexon and capsid are serotype 11, wherein the virus genome comprises a DNA sequence encoding a therapeutic antibody or antibody-binding fragment located in a part of the virus genome which is expressed late in the virus replication cycle and such that the transgene does not interfere with virus replication, wherein said DNA sequence under the control of a promoter exogenous to the adenovirus, for example wherein the DNA sequence encoding the therapeutic antibody or antibody-binding fragment is under the control of the CMV promoter, in particular the DNA sequence encoding an antibody or antibody-binding fragment is located after L5 in the virus genome sequence (i.e. towards the end of the 3′ end of the virus sequence).

[0150] Employing an exogenous promoter may be advantageous because it can strongly and constitutively express the antibody or fragment, which may be particularly useful in some situations, for example where the patient has very pervasive cancer.

[0151] In one embodiment expression of the antibody or fragment is under the control of a CMV promoter.

[0152] In one embodiment the exogenous promoter is associated with this DNA sequence, for example is part of the expression cassette encoding the antibody or fragment.

[0153] In one embodiment the DNA sequence encoding the antibody or fragment is located after the L5 gene in the virus sequence. Advantageously, the present inventors have established that a variety of transgenes can be inserted into B_{X} and/or B_{Y} under the control of an exogenous or endogenous promoter, without adversely affecting the life cycle of the virus or the stability of the vector.

[0154] In one embodiment the transgene is part of a transgene cassette comprising at least one coding sequence (i.e. at least one transgene) and optionally one or more elements independently selected from:

[0155] i. a regulator of gene expression, such as an exogenous promoter or splice acceptor;

[0156] ii. an internal ribosome entry (IRES) DNA sequence;

[0157] iii. a DNA sequence encoding a high self-cleavage efficiency 2A peptide;

[0158] iv. a DNA sequence encoding a polyadenylation sequence, and

[0159] v. combinations of the same.

[0160] Thus in one embodiment the transgene cassette comprises i) or ii) or iii) or iv).

[0161] In one embodiment the transgene cassette comprises i) and ii), or i) and iii), or i) and iv), or ii) and iii), or ii) and iv), or iii) and iv).

[0162] In one embodiment the transgene cassette comprises i) and ii) and iii), or i) and ii) and iv), or i) and iii) and iv), or ii) and iii) and iv).

[0163] In one embodiment the transgene cassette comprises i) and ii) and iii) and iv).

[0164] In one embodiment the transgene or transgene cassette comprises a Kozak squence, which assists in the translation of mRNA, for example at the start of a protein coding sequence.

[0165] retains the function of the ITR when incorporated into an adenovirus in an appropriate location. In one embodiment the 5′ITR comprises or consists of the sequence from about 1 bp to 138 bp of SEQ ID NO: 12 or a sequence 90, 95, 96, 97, 98 or 99% identical thereto along the whole length, in particular the sequence consisting of from about 1 bp to 138 bp of SEQ ID NO: 12.

[0166] The 3′ITR as employed herein refers to part or all of an ITR from 3′ end of an adenovirus which retains the function of the ITR when incorporated into an adenovirus in an appropriate location. In one embodiment the 3′ITR comprises or consists of the sequence from about 32189 bp to 32326 bp of SEQ ID NO: 12 or a sequence 90, 95, 96, 97, 98 or 99% identical thereto along the whole length, in particular the sequence consisting of from about 32189 bp to 32326 bp of SEQ ID NO: 12.

[0167] B₁ as employed herein refers to the DNA sequence encoding: part or all of an E1A from an adenovirus, part or all of the E1B region of an adenovirus, and independently part or all of E1A and E1B region of an adenovirus.

[0168] When B₁ is a bond then E1A and E1B sequences will be omitted from the virus. In one embodiment B₁ is a bond and thus the virus is a vector.

[0169] In one embodiment B₁ further comprises a transgene. It is known in the art that the E1 region can accommodate a transgene which may be inserted in a disruptive way into the E1 region (i.e. in the “middle” of the sequence) or part or all of the E1 region may be deleted to provide more room to accommodate genetic material.

[0170] E1A as employed herein refers to the DNA sequence encoding part or all of an adenovirus E1A region. The latter here is referring to the polypeptide/protein E1A. It may be mutated such that the protein encoded by the E1A gene has conservative or non-conservative amino acid changes, such that it has: the same function as wild-type (i.e. the corresponding non-mutated protein); increased function in comparison to wild-type protein; decreased function, such as no function in comparison to wild-type protein; or has a new function in comparison to wild-type protein or a combination of the same as appropriate.

[0171] E1B as employed herein refers to the DNA sequence encoding part or all of an adenovirus E1B region (i.e. polypeptide or protein), it may be mutated such that the protein encoded by the E1B gene/region has conservative or non-conservative amino acid changes, such that it has: the same function as wild-type (i.e. the corresponding non-mutated protein); increased function in comparison to wild-type protein; decreased function, such as no function in comparison to wild-type protein; or has a new function in comparison to wild-type protein or a combination of the same as appropriate.

[0172] Thus B₁ can be modified or unmodified relative to a wild-type E1 region, such as a wild-type E1A and/or E1B. The skilled person can easily identify whether E1A and/or E1B are present or (part) deleted or mutated.

[0173] Wild-type as employed herein refers to a known adenovirus. A known adenovirus is one that has been identified and named, regardless of whether the sequence is available.

[0174] In one embodiment B₁ has the sequence from 139 bp to 3932 bp of SEQ ID NO: 12.

[0175] B_{A} as employed herein refers to the DNA sequence encoding the E2B-L1-L2-L3-E2A-L4 regions including any non-coding sequences, as appropriate. Generally this sequence will not comprise a transgene. In one embodiment the sequence is substantially similar or identical to a contiguous sequence from a known adenovirus, for example a serotype shown in Table 1, in particular a group B virus, for example Ad3, Ad7, Ad11, Ad14, Ad16, Ad21, Ad34, Ad35, Ad51 or a combination thereof, such as Ad3, Ad11 or a combination thereof. In one embodiment is E2B-L1-L2-L3-E2A-L4 refers to comprising these elements and other structural elements associated with the region, for example B_{A} will generally include the sequence encoding the protein IV2a, for example as follows: IV2A IV2a-E2B-L1-L2-L3-E2A-L4

[0176] In one embodiment the E2B region is chimeric. That is, comprises DNA sequences from two or more different adenoviral serotypes, for example from Ad3 and Ad11, such as Ad11p. In one embodiment the E2B region has the sequence from 5068 bp to 10355 bp of SEQ ID NO: 12 or a sequence 95%, 96%, 97%, 98% or 99% identical thereto over the whole length.

[0177] In one embodiment the E2B in component BA comprises the sequences shown in SEQ ID NO: 47 (which corresponds to SEQ ID NO: 3 disclosed in WO2005/118825).

[0178] In one embodiment B_{A} has the sequence from 3933 bp to 27184 bp of SEQ ID NO: 12.

[0179] E3 as employed herein refers to the DNA sequence encoding part or all of an adenovirus E3 region (i.e. protein/polypeptide), it may be mutated such that the protein encoded by the E3 gene has conservative or non-conservative amino acid changes, such that it has the same function as wild-type (the corresponding unmutated protein); increased function in comparison to wild-type protein; decreased function, such as no function in comparison to wild-type protein or has a new function in comparison to wild-type protein or a combination of the same, as appropriate.

[0180] In one embodiment the E3 region is form an adenovirus serotype given in Table 1 or a combination thereof, in particular a group B serotype, for example Ad3, Ad7, Ad11 (in particular Ad11p), Ad14, Ad16, Ad21, Ad34, Ad35, Ad51 or a combination thereof, such as Ad3, Ad11 (in particular Ad11p) or a combination thereof.

[0181] In one embodiment the E3 region is partially deleted, for example is 95%, 90%, 85%, 80%, 75%, 70%, 65%, 60%, 55%, 50%, 45%, 40%, 35%, 30%, 25%, 20%, 15%, 10%, 5% deleted.

[0182] In one embodiment B2 is a bond, wherein the DNA encoding the E3 region is absent.

[0183] In one embodiment the DNA encoding the E3 region can be replaced or interrupted by a transgene. As employed herein “E3 region replaced by a transgene as employed herein includes part or all of the E3 region is replaced with a transgene.

[0184] In one embodiment the B2 region comprises the sequence from 27185 bp to 28165 bp of SEQ ID NO: 12.

[0185] In one embodiment B2 consists of the sequence from 27185 bp to 28165 bp of SEQ ID NO: 12.

[0186] B_{X} as employed herein refers to the DNA sequence in the vicinity of the 5′ end of the L5 gene in B_{B}. In the vicinity of or proximal to the 5′ end of the L5 gene as employed herein refers to: adjacent (contiguous) to the 5′ end of the L5 gene or a non-coding region inherently associated herewith i.e. abutting or contiguous to the 5′ prime end of the L5 gene or a non-coding region inherently associated therewith. Alternatively, in the vicinity of or proximal to may refer to being close the L5 gene, such that there are no coding sequences between the BX region and the 5′ end of L5 gene.

[0187] Thus in one embodiment B_{X} is joined directly to a base of L5 which represents, for example the start of a coding sequence of the L5 gene.

[0188] Thus in one embodiment B_{X} is joined directly to a base of L5 which represents, for example the start of a non-coding sequence, or joined directly to a non-coding region naturally associated with L5. A non-coding region naturally associated L5 as employed herein refers to part of all of a non-coding regions which is part of the L5 gene or contiguous therewith but not part of another gene.

[0189] In one embodiment B_{X} comprises the sequence of SEQ ID NO: 10. This sequence is an artificial non-coding sequence wherein a DNA sequence, for example comprising a transgene (or transgene cassette), a restriction site or a combination thereof may be inserted therein. This sequence is advantageous because it acts as a buffer in that allows some flexibility on the exact location of the transgene whilst minimising the disruptive effects on virus stability and viability.

[0190] The insert(s) can occur anywhere within SEQ ID NO: 10 from the 5′ end, the 3′ end or at any point between bp 1 to 201, for example between base pairs 1/2, 2/3, 3/4, 4/5, 5/6, 6/7, 7/8, 8/9, 9/10, 10/11, 11/12, 12/13, 13/14, 14/15, 15/16, 16/17, 17/18, 18/19, 19/20, 20/21, 21/22, 22/23, 23/24, 24/25, 25/26, 26/27, 27/28, 28/29, 29/30, 30/31, 31/32, 32/33, 33/34, 34/35, 35/36, 36/37, 37/38, 38/39, 39/40, 40/41, 41/42, 42/43, 43/44, 44/45, 45/46, 46/47, 47/48, 48/49, 49/50, 50/51, 51/52, 52/53, 53/54, 54/55, 55/56, 56/57, 57/58, 58/59, 59/60, 60/61, 61/62, 62/63, 63/64, 64/65, 65/66, 66/67, 67/68, 68/69, 69/70, 70/71, 71/72, 72/73, 73/74, 74/75, 75/76, 76/77, 77/78, 78/79, 79/80, 80/81, 81/82, 82/83, 83/84, 84/85, 85/86, 86/87, 87/88, 88/89, 89/90, 90/91, 91/92, 92/93, 93/94, 94/95, 95/96, 96/97, 97/98, 98/99, 99/100, 100/101, 101/102, 102/103, 103/104, 104/105, 105/106, 106/107, 107/108, 108/109, 109/110, 110/111, 111/112, 112/113, 113/114, 114/115, 115/116, 116/117, 117/118, 118/119, 119/120, 120/121, 121/122, 122/123, 123/124, 124/125, 125/126, 126/127, 127/128, 128/129, 129/130, 130/131, 131/132, 132/133, 133/134, 134/135, 135/136, 136/137, 137/138, 138/139, 139/140, 140/141, 141/142, 142/143, 143/144, 144/145, 145/146, 146/147, 147/148, 148/149, 150/151, 151/152, 152/153, 153/154, 154/155, 155/156, 156/157, 157/158, 158/159, 159/160, 160/161, 161/162, 162/163, 163/164, 164/165, 165/166, 166/167, 167/168, 168/169, 169/170, 170/171, 171/172, 172/173, 173/174, 174/175, 175/176, 176/177, 177/178, 178/179, 179/180, 180/181, 181/182, 182/183, 183/184, 184/185, 185/186, 186/187, 187/188, 189/190, 190/191, 191/192, 192/193, 193/194, 194/195, 195/196, 196/197, 197/198, 198/199, 199/200 or 200/201.

[0191] In one embodiment B_{X} comprises SEQ ID NO: 10 with a DNA sequence inserted between bp 27 and bp 28 or a place corresponding to between positions 28192 bp and 28193 bp of SEQ ID NO: 12.

[0192] In one embodiment the insert is a restriction site insert. In one embodiment the restriction site insert comprises one or two restriction sites. In one embodiment the restriction site is a 19 bp restriction site insert comprising 2 restriction sites. In one embodiment the restriction site insert is a 9 bp restriction site insert comprising 1 restriction site. In one embodiment the restriction site insert comprises one or two restriction sites and at least one transgene, for example one or two transgenes. In one embodiment the restriction site is a 19 bp restriction site insert comprising 2 restriction sites and at least one transgene, for example one or two transgenes. In one embodiment the restriction site insert is a 9 bp restriction site insert comprising 1 restriction site and at least one transgene, for example one, two or three transgenes, such as one or two. In one embodiment two restriction sites sandwich one or more, such as two transgenes (for example in a transgene cassette). In one embodiment when B_{X} comprises two restrictions sites the said restriction sites are different from each other. In one embodiment said one or more restrictions sites in B_{X} are non-naturally occurring in the particular adenovirus genome into which they have been inserted. In one embodiment said one or more restrictions sites in B_{X} are different to other restrictions sites located elsewhere in the adenovirus genome, for example different to naturally occurring restrictions sites and/or restriction sites introduced into other parts of the genome, such as a restriction site introduced into B_{Y}. Thus in one embodiment the restriction site or sites allow the DNA in the section to be cut specifically.

[0193] Advantageously, use of “unique” restriction sites provides selectivity and control over the where the virus genome is cut, simply by using the appropriate restriction enzyme.

[0194] Cut specifically as employed herein refers to where use of an enzyme specific to the restriction sites cuts the virus only in the desired location, usually one location, although occasionally it may be a pair of locations. A pair of locations as employed herein refers to two restrictions sites in proximity of each other that are designed to be cut by the same enzyme (i.e. cannot be differentiated from each other).

[0195] In one embodiment the restriction site insert is SEQ ID NO: 55.

[0196] In one embodiment B_{X} has the sequence from 28166 bp to 28366 bp of SEQ ID NO: 12.

[0197] In one embodiment B_{X} is a bond.

[0198] B_{B} as employed herein refers to the DNA sequence encoding the L5 region. As employed herein the L5 region refers to the DNA sequence containing the gene encoding the fibre polypeptide/protein, as appropriate in the context. The fibre gene/region encodes the fibre protein which is a major capsid component of adenoviruses. The fibre functions in receptor recognition and contributes to the adenovirus' ability to selectively bind and infect cells.

[0199] In viruses of the present disclosure the fibre can be from any adenovirus serotype and adenoviruses which are chimeric as result of changing the fibre for one of a different serotype are known. In one embodiment the fibre is from a group B virus, in particular Ad11, such as Ad11p.

[0200] In one embodiment B_{B} has the sequence from 28367 bp to 29344 bp of SEQ ID NO: 12.

[0201] DNA sequence in relation to B_{Y} as employed herein refers to the DNA sequence in the vicinity of the 3′ end of the L5 gene of B_{B}. In the vicinity of or proximal to the 3′ end of the L5 gene as employed herein refers to: adjacent (contiguous) to the 3′ end of the L5 gene or a non-coding region inherently associated therewith i.e. abutting or contiguous to the 3′ prime end of the L5 gene or a non-coding region inherently associated therewith (i.e. all or part of an non-coding sequence endogenous to L5). Alternatively, in the vicinity of or proximal to may refer to being close the L5 gene, such that there are no coding sequences between the B_{Y} region and the 3′ end of the L5 gene.

[0202] Thus in one embodiment B_{Y} is joined directly to a base of L₅ which represents the “end” of a coding sequence.

[0203] Thus in one embodiment B_{Y} is joined directly to a base of L5 which represents the “end” of a non-coding sequence, or joined directly to a non-coding region naturally associated with L5.

[0204] Inherently and naturally are used interchangeably herein. In one embodiment B_{Y} comprises the sequence of SEQ ID NO: 11. This sequence is a non-coding sequence wherein a DNA sequence, for example comprising a transgene (or transgene cassette), a restriction site or a combination thereof may be inserted. This sequence is advantageous because it acts a buffer in that allows some flexibility on the exact location of the transgene whilst minimising the disruptive effects on virus stability and viability.

[0205] The insert(s) can occur anywhere within SEQ ID NO: 11 from the 5′ end, the 3′ end or at any point between bp 1 to 35, for example between base pairs 1/2, 2/3, 3/4, 4/5, 5/6, 6/7, 7/8, 8/9, 9/10, 10/11, 11/12, 12/13, 13/14, 14/15, 15/16, 16/17, 17/18, 18/19, 19/20, 20/21, 21/22, 22/23, 23/24, 24/25, 25/26, 26/27, 27/28, 28/29, 29/30, 30/31, 31/32, 32/33, 33/34, or 34/35.

[0206] In one embodiment B_{Y} comprises SEQ ID NO: 11 with a DNA sequence inserted between positions bp 12 and 13 or a place corresponding to 29356 bp and 29357 bp in SEQ ID NO: 12. In one embodiment the insert is a restriction site insert. In one embodiment the restriction site insert comprises one or two restriction sites. In one embodiment the restriction site is a 19 bp restriction site insert comprising 2 restriction sites. In one embodiment the restriction site insert is a 9 bp restriction site insert comprising 1 restriction site. In one embodiment the restriction site insert comprises one or two restriction sites and at least one transgene, for example one or two or three transgenes, such as one or two transgenes. In one embodiment the restriction site is a 19 bp restriction site insert comprising 2 restriction sites and at least one transgene, for example one or two transgenes. In one embodiment the restriction site insert is a 9 bp restriction site insert comprising 1 restriction site and at least one transgene, for example one or two transgenes. In one embodiment two restriction sites sandwich one or more, such as two transgenes (for example in a transgene cassette). In one embodiment when B_{Y} comprises two restrictions sites the said restriction sites are different from each other. In one embodiment said one or more restrictions sites in B_{Y} are non-naturally occurring (such as unique) in the particular adenovirus genome into which they have been inserted. In one embodiment said one or more restrictions sites in B_{Y} are different to other restrictions sites located elsewhere in the adenovirus genome, for example different to naturally occurring restrictions sites or restriction sites introduced into other parts of the genome, such as B_{X}. Thus in one embodiment the restriction site or sites allow the DNA in the section to be cut specifically.

[0207] In one embodiment the restriction site insert is SEQ ID NO: 54.

[0208] In one embodiment B_{Y} has the sequence from 29345 bp to 29379 bp of SEQ ID NO: 12.

[0209] In one embodiment B_{Y} is a bond.

[0210] In one embodiment the insert is after bp 12 in SEQ ID NO: 11.

[0211] In one embodiment the insert is at about position 29356 bp of SEQ ID NO: 12.

[0212] In one embodiment the insert is a transgene cassette comprising one or more transgenes, for example 1, 2 or 3, such as 1 or 2.

[0213] E4 as employed herein refers to the DNA sequence encoding part or all of an adenovirus E4 region (i.e. polypeptide/protein region), which may be mutated such that the protein encoded by the E4 gene has conservative or non-conservative amino acid changes, and has the same function as wild-type (the corresponding non-mutated protein); increased function in comparison to wild-type protein; decreased function, such as no function in comparison to wild-type protein or has a new function in comparison to wild-type protein or a combination of the same as appropriate.

[0214] In one embodiment the E4 region is partially deleted, for example is 95%, 90%, 85%, 80%, 75%, 70%, 65%, 60%, 55%, 50%, 45%, 40%, 35%, 30%, 25%, 20%, 15%, 10% or 5% deleted. In one embodiment the E4 region has the sequence from 32188 bp to 29380 bp of SEQ ID NO: 12.

[0215] In one embodiment B3 is a bond, i.e. wherein E4 is absent.

[0216] In one embodiment B3 has the sequence consisting of from 32188 bp to 29380 bp of SEQ ID NO: 12.

[0217] As employed herein number ranges are inclusive of the end points.

[0218] The skilled person will appreciate that the elements in the formulas herein, such as formula (I) are contiguous and may embody non-coding DNA sequences as well as the genes and coding DNA sequences (structural features) mentioned herein. In one or more embodiments the formulas of the present disclosure are attempting to describe a naturally occurring sequence in the adenovirus genome. In this context it will be clear to the skilled person that the formula is referring to the major elements characterising the relevant section of genome and is not intended to be an exhaustive description of the genomic stretch of DNA.

[0219] E1A, E1B, E3 and E4 as employed herein each independently refer to the wild-type and equivalents thereof, mutated or partially deleted forms of each region as described herein, in particular a wild-type sequence from a known adenovirus.

[0220] “Insert” as employed herein refers to a DNA sequence that is incorporated either at the 5′ end, the 3′ end or within a given DNA sequence reference segment such that it interrupts the reference sequence. The latter is a reference sequence employed as a reference point relative to which the insert is located. In the context of the present disclosure inserts generally occur within either SEQ ID NO: 10 or SEQ ID NO: 11. An insert can be either a restriction site insert, a transgene cassette or both. When the sequence is interrupted the virus will still comprise the original sequence, but generally it will be as two fragments sandwiching the insert.

[0221] In one embodiment the transgene or transgene cassette does not comprise a non-biased inserting transposon, such as a Tn7 transposon or part thereof. Tn7 transposon as employed herein refers to a non-biased insertion transposon as described in WO2008/080003.

[0222] A continuous process of manufacture as employed herein is a process for the manufacture of a virus as defined according to the present disclosure, in particular such that the virus produced by each cell is increased in comparison to non-continuous process, for example where the virus particles produced at at least one or at at least two time points in the process is 50,000 per cell or greater, for example a virus described herein, such as replication competent chimeric oncolytic adenovirus wherein the virus has two or more replication cycles.

[0223] A continuous process is the opposite of a discrete culture wherein the cells after infection are not supplemented with additional cells, and cells are, for example lysed to harvest the replicated virus, or cells are discarded after a single virus replication cycle and recovery of the virus therefrom. As part of the process of the present disclosure, virus-containing cell-free supernatant may be harvested multiple times or continuously for downstream purification of virus. In one embodiment the harvesting is not at the end of the period of cell culturing.

[0224] In one embodiment the virus particles produced per cell at one or more time points is at least 75,000, for example 80,000; 90,000; 100,000; 150,000; 175,000; 180,000 or 195,000.

[0225] The virus yields per cell in these ranges are achieved by selecting the relevant the parameters for the given virus. The parameters that important for achieving these yields are starting seed density, multiplicity of infection (MOI), changing the media and the duration of the process. Whilst not wishing to be bound by theory is believed that controlling these parameters allows control over the process in relation to yield and may also provide control over where the virus product is located i.e. in the supernatant, in the cell or both.

[0226] Low multiplicity of infection as employed herein refers to a multiplicity of infection of less than 20, such as 19, 18, 17, 16, 15, 14, 13, 12.5, 12, 11, 10, 9, 8, 7, 6 or 5.

[0227] A high multiplicity of infection as employed herein refers to a multiplicity of infection of 45 or higher, such as 46, 47, 48, 49, 50, 51, 52, 53, 54, 55 or higher such as 100.

[0228] Low seed density as employed herein refers to a seed density of 2×10⁶ or less, such as 1.9, 1.8, 1.7, 1.6, 1.5, 1.4, 1.3, 1.2, 1.1, 1.0, 0.9, 0.8, 0.7, 0.6 or 0.5×10⁶ or less.

[0229] High seed density as employed herein is 3.5×10⁶ or greater, for example 3.6, 3.7, 3.8, 3.9, 4.0, 4.1, 4.2, 4.3, 4.4, 4.5×10⁶ or greater.

[0230] In one embodiment of the process the mammalian cells are infected with a starting concentration of virus of 1-9×10⁴ vp/ml or greater, such as 1-9×10⁵, 1-9×10⁶, 1-9×10⁷, 1-9×10⁸, 1-9×10⁹, in particular 1-5×10⁶ vp/ml or 2.5-5×10⁸ vp/ml.

[0231] In one embodiment the mammalian cells are infected with a starting seed density of 1-4×10⁶ vp/ml, such as 1, 1.1, 1.2, 1.3, 1.4, 1.5, 1.6, 1.7, 1.8, 1.9, 2, 2.5, 3.0 or 4×10⁶ vp/ml.

[0232] In one embodiment of the process the mammalian cells are infected at a starting concentration of 1×10⁶ vp/ml at about 1 to 200 ppc, for example 40 to 120 ppc, such as 50 ppc.

[0233] Ppc as employed herein refers to the number of viral particles per cell. Ppc and multiplicity of infection are employed interchangeably herein.

[0234] In one embodiment the viruses, such as chimeric oncolytic adenovirus, during culture is at concentration in the range 20 to 150 particles per cell (ppc), such as 40 to 100 ppc, in particular 50 ppc. This concentration is a concentration during the culturing processes as opposed to the starting seed density. Lower values of virus concentrations, for example less than 100 ppc, such as 50 ppc, in particular 20 or less such as 15, 14, 13, 12.5, 12, 11 or 10 may be advantageous. Advantages may include one or more of the following properties increased cell viability compared to cultures with higher virus concentrations, particularly when cell viability is measured before harvesting, and increased levels of virus particle production per cell.

[0235] In one embodiment the number of cells in the culture is adjusted to correspond to the levels of virus in the culture, for example cells are added to the culture (such as cells in a stationary phase) or cell growth of the culture is adjusted to provide a cell number that maintain the multiplicity of infection (MOI) about constant.

[0236] Virus production also depends on cell density. In one embodiment the cell density is in the range 1 to 10 million cells/ml, including 2 to 10 million cells/ml.

[0237] “towards the end of the process” as employed herein refers to the last 40% of the time for which the process is running, for example from about 60 hours post infection, such as 65, 70, 71, 72, 73, 74, 75, 76, 77, 78, 79, 80, 81, 82, 83, 84, 85, 86, 87, 88, 89 or more.

[0238] “Viable cells for virus infection and production are maintained in the vessel at a level suitable for replicating the virus” as employed herein refers to maintaining viable cells at a level which is generating desirable, useful, normal yields of virus.

[0239] Viable cells are cells which are capable of being infected by virus and/or are capable of supporting replicating virus, in particular healthy cells capable of being infected by virus and/or are capable of supporting replicating virus.

[0240] Low cell viability can result in cell lysis which may expose the cell to enzymes or proteins, which with time may attack the virus. However, in a dynamic process such as cell culturing a percentage, such as a small percentage of cells may be lysed. This does not generally cause significant problems in practical terms.

[0241] A non-viable cells will be dead, lysed, inactive in respect of viral replication.

[0242] A leaky cell is one which has a membrane with increased permeability.

[0243] Interestingly cells which are added the culture during the manufacturing process appear to develop increased permeability relatively rapidly, for example within about 24 hours, i.e. where they are stained by a viability dye. Having said that this does not appear to be a disadvantage because high levels of virus particles including infectious viral particles are still produced.

[0244] Methods of testing cell viability are known to those skilled in the art and include taking a sample of cells and testing them with a viability stain that penetrates and stains cell which are non-viable and also penetrate leaky cells.

[0245] Cell viability assays may be based on one or more of the following techniques:
[0246] 1. Cytolysis or membrane leakage assays: This category includes the lactate dehydrogenase assay, a stable enzyme common in all cells which can be readily detected when cell membranes are no longer intact. Examples include Propidium iodide, Trypan blue, and 7-Aminoactinomycin D.
[0247] 2. Mitochondrial activity or caspase assays: Resazurin and Formazan (MTT/XTT) can assay for various stages in the apoptosis process that foreshadow cell death.
[0248] 3. Functional assays: Assays of cell function will be highly specific to the types of cells being assayed. For example, motility is a widely used assay of sperm cell function. Fertility can be used to assay gamete survival, in general. Red blood cells have been assayed in terms of deformability, osmotic fragility, hemolysis, ATP level, and hemoglobin content.
[0249] 4. Genomic and proteomic assays: Cells can be assayed for activation of stress pathways using DNA microarrays and protein chips.

[0250] A common list of tests employed to assay cell viability include: ATP test, Calcein AM, Clonogenic assay, Ethidium homodimer assay, Evans blue, Fluorescein diacetate hydrolysis/Propidium iodide staining (FDA/PI staining), Flow cytometry, Formazan-based assays (MTT/XTT), Green fluorescent protein, Lactate dehydrogenase (LDH), Methyl violet, Propidium iodide, DNA stain that can differentiate necrotic, apoptotic and normal cells, Resazurin, Trypan Blue, a living-cell exclusion dye (dye only crosses cell membranes of dead cells), and TUNEL assay.

[0251] Thus the viability of cells can be tested by cell staining with, for example Trypan blue (and light microscopy) or 7-amino-actinomycin D, vital dye emitting at 670 nm (or ViaProbe a commercial ready-to-use solution of 7AAD) and flow cytometry, employing a technique known to those skilled in the art. Where the stain penetrates into the cells the cells are considered not viable. Cells which do not take up dye are considered viable. An exemplary method may employ about 5 μL of 7AAD and about 5 μL of Annexin-V (a phospholipid-binding protein which binds to external phospholipid phosphatidylserine exposed during apoptosis) per approximate 1004 of cells suspension. This mixture may be incubated at ambient temperature for about 15 minutes in the absence of light. The analysis may then be performed employing flow cytometry. See for example MG Wing, AMP Montgomery, S. Songsivilai and JV Watson. An Improved Method for the Detection of Cell Surface Antigens in Samples of Low Viability using Flow Cytometry. J Immunol Methods 126: 21-27 1990.

[0252] In one embodiment oxygen uptake or oxygen transfers is used to evaluate the viability of the cells. This may be a more appropriate method of analysing the viability of cells because the leaky cells which are still capable of replicating virus may be stained with reagents such as Trypan blue etc. Thus this method may be used to differential dead/lysed cells vs leaky cells.

[0253] Surprisingly, the present inventors have found that, when employing some embodiment s of the process, the cells maintain high viability (such as 80 to 90% viability in this context is not stained with a viability dye) post-infection for over the periods described herein for continuous manufacture, in particular when there is no addition of fresh cells. Thus in one embodiment the harvesting and process may continue as long as sufficient cells remain viable.

[0254] In one embodiment with no media exchange and no addition or replacement of cells supporting virus replication the cell viability is around 50 to 100% during the process, for example 60 to 95% at the 96 hour time point (i.e. 96 hours post-infection) when infected with EnAd, such as 90% viability (i.e. 90% of cells had no staining with a viability dye).

[0255] In one embodiment cell viability is around 50 to 100% during the process, for example 60 to 90% at the 96 hour time point (i.e. 96 hours post-infection) when infected with NG76, such as 83% viability (i.e. 83% of cells had no staining with a viability dye), in particular when no fresh cells are added.

[0256] In one embodiment cell viability is around 50 to 100% during the process, for example 60 to 90% at the 96 hour time point (i.e. 96 hours post-infection) when infected with NG135, such as 85% viability (i.e. 85% of cells had no staining with a viability dye), in particular when no fresh cells are added.

[0257] In one embodiment cell viability is around 50 to 100% during the process, for example 80 to 90% at the 96 hour time point (i.e. 96 hours post-infection) when infected with Ad11. For example 85% viability (i.e. 85% of cells had no staining with a viability dye), in particular when no fresh cells are added.

[0258] In one embodiment the culture process comprises one or more cell additions or changes. Cell addition employed herein refers to replenishing some or all of the cells and optionally removing dead cells. Cell change as employed herein refers to removing at least some cells and adding fresh cells

[0259] In one embodiment during the period of continuous manufacture non-viable cells are replaced to maintain an ongoing/sustained period of virus replication and ongoing/sustained release of virus into the culture medium, for example virus replication is a continuous (i.e. non-interrupted) although virus replication levels may fluctuate during the process.

[0260] In one embodiment the viability of the newly added cells may be the important factor and thus if the cell viability (i.e. as tested by viability staining dye) across the whole cell culture is measured it may in fact be below 50%, provided there are sufficient cells to keep replicate adequate amounts of virus. However, the dye staining does not necessarily differentiate between non-viable cells and leaky cells.

[0261] Whilst not wishing to be bound by theory cells which may be leaky also appear to be viable to produce virus.

[0262] In some instances 70% or more of the cells employed in the process may be leaky, for example due to the stress exerted on them by the present process. However, this seems to have little impact on the performance of the cells in producing virus. Thus for the purpose of the present process the cells may remain sufficiently viable for producing virus even when a viability dye would stain them. In processes according to the present disclosure where new cells are added to the culture the cell staining with a viability stain may be very high, for example 70% of the cell population in experiments performed in shake flasks even after the addition of the fresh cells. Having said that bioreactor processes are particularly suitable for performing virus manufacturing in mammalian cells and the amount of staining of cells from a bioreactor process may be less.

[0263] In one embodiment a process according to the present disclosure is performed in a bioreactor.

[0264] An example of a suitable bioreactor system is the iCELLis bioreactor, which is a fully integrated high density bioreactor packed with for example microfibres. This system is particularly suitable for culturing adherent cells. Evenly-distributed media circulation is achieved by a built-in magnetic drive impeller, ensuring low shear stress and high cell viability. The cell culture medium flows through the fixed-bed from the bottom to the top. At the top, the medium falls as a thin film down the outer wall where it takes up O₂ to maintain high K_{L}a. in the bioreactor. This oxygenation, together with a gentle agitation and biomass immobilization, enables the compact iCELLis bioreactor to achieve and maintain high-cell densities, equaling the productivity of much larger stirred tank units. See further details at for example:

[0265] http://www.pall.com/main/biopharmaceuticals/product.page?lid=hw7uq21l

[0266] An ongoing or sustained period of virus replication is one where the virus has time for more than one replication cycle (i.e. has two or more replication cycles). A replication cycle is where a given virus enters a cell replicates and the virus and/or viral particles are released from the cell and then the virus or the progeny thereof go on to infect a cell or cells and proceed to replicate.

[0267] A process for the manufacture of a virus as employed herein is intended to refer to a process wherein the virus is replicated and thus the number of viral particles is increased. In particular the manufacturing is to provide sufficient numbers of viral particles to formulate a therapeutic product, for example in the range 1-9×10⁵ to 1-9×10²⁰ or more particles may be produced, such as in the range of 1-9×10⁸ to 1-9×10¹⁵ viral particles, in particular 1 to 9×10¹⁰ or 1-9×10¹⁵ viral particles may be produced from a 10 L batch.

[0268] In one embodiment the yield is about 1-2×10′ vp per litre.

[0269] In one embodiment the virus production per cell is 50,000 virus particles or greater, for example independently selected from the group comprising 55,000; 60,000; 65,000; 70,000; 75,000; 80,000; 90,000; 95,000; 100,000; 105,000; 110,000; 115,000; 120,000; 125,000; 130,000; 135,000; 140,000; 145,000; 150,000; 155,000; 160,000; 165,000; 170,000; 175,000; 176,000; 177,000; 178,000; 179,000; 180,000; 181,000; 182,000; 183,000; 184,000; 185,000; 186,000; 187,000; 188,000; 189,000; 190,000; 191,000; 192,000; 193,000; 194,000; 195,000; 196,000; 197,000; 198,000; 199,000; 200,000; 201,000; 202,000 virus particles per cell or greater, at one or more time points.

[0270] The period of continuous manufacture as employed herein is simply the duration of a given manufacturing campaign. Generally the processes of the invention will have a period of continuous manufacture, which is 48 hours or greater, for example 70, 80, 84, 86, 90, 96, 100, 108, 120, 124, 128, 132, 144, 156, 168, 180, 192, 204, 216, 228, 240 hours or more (wherein said values are +/−3 hours), for example in the range 144 hours to 240 hours, such as 156, 168, 180, 192, 204, 216, 228 or 240 hours.

[0271] In one embodiment the culturing period is in the range 70 to 300 hours, for example 144 to 240 hours, for example 144, 156, 168, 180, 192, 204, 216, 228 or 240 hours.

[0272] In one embodiment the continuous manufacturing process is characterised in that the cells are cultured for more than 100 hours.

[0273] In one embodiment the continuous manufacturing process of the present disclosure is characterised by a post infection culturing period of up to 100 hours and at least one media change or addition and at least one cell change or cell addition.

[0274] In on embodiment the continuous manufacture is in the range 35 to 96 hours post infection.

[0275] Advantageously, the viruses of the present disclosure do not appear to degrade, even when the culturing process is extended to 70 hours or more. The degradation of the virus can be checked by assaying the infectivity of the virus. The infectivity of the virus decreases as the viral particles degrade.

[0276] Maximum total virus production as employed herein means the total number of viral particles produced per cell and encompasses viral particles in the supernatant and the cell.

[0277] In one embodiment the maximum total virus production is achieved at about 40 to 60 hours post-infection and multiples thereof, for example 49, 98, 147 etc hours post-infection.

[0278] In one embodiment the maximum total virus production is achieved at about 70 to 90 hours post-infection and multiples thereof, for example 140-180 hours post infection.

[0279] In one embodiment maximum total virus yield is achieved at about 60 to 96 hours post infection.

[0280] Changing/replacing the media one or more times in the process appears to have a positive and significant impact on virus yield. In one embodiment the media is changed without removing cells. In one embodiment 5 to 100% of the media is changed at at least one time point. In one embodiment media and cells are removed, for example 10, 20, 30, 40, 50, 60, 70, 80% or more of cell suspension (of a cell suspension culture process) is removed and replaced with fresh media and cells.

[0281] In one embodiment media is added on one or more occasions during the process. This may be particularly advantageous when the host cells are in an exponential growth phase.

[0282] In one embodiment the culture process comprises one or more media changes. This may be beneficial for optimising cell growth, yield or similar. Where a medium change is employed, it may be necessary to recover virus particle from the media being changed. These particles can be combined with the main virus batch to ensure the yield of virus is optimised. Similar techniques may also be employed with the medium of a perfusion process to optimise virus recovery.

[0283] In one embodiment the culture process does not include a medium change step. This may be advantageous because no viral particles will be lost and therefore yield may be optimised.

[0284] In one embodiment the medium and/or cells are supplements or replenished periodically.

[0285] In one embodiment the cells are harvested during the process, for example at a discrete time point or time points or continuously.

[0286] Media suitable for culturing mammalian cells includes, but are not limited to, EX-CELL® media from Sigma-Aldrich, such as EX-CELL® 293 serum free medium for HEK293 cells, EX-CELL® ACF CHO media serum free media for CHO cells, EX-CELL® 302 serum free media for CHO cells, EX-CELL CD hydrolysate fusion media supplement, from Lonza RMPI (such as RMPI 1640 with HEPES and L-glutamine, RMPI 1640 with or without L-glutamine, and RMPI 1640 with UltraGlutamine), MEM, DMEM, and SFMII medium.

[0287] In one embodiment the media is serum free. This is advantageous because it facilitates registration of the manufacturing process with the regulatory authorities.

[0288] The addition of fresh media as employed herein refers to the addition of media where the nutrients and ingredients are at suitable level for supporting cell growth, i.e. not depleted.

[0289] Media change as employed herein refers to replacing some or all of the media employed in the process, for example removing some media and adding fresh media.

[0290] “Isolating from the media the virus produced from step a) wherein the isolation of virus is not subsequent to a cell lysis step” as employed herein refers to at least one step wherein virus obtained from the process is isolated from the supernatant. The process may also, if appropriate comprise a cell lysis step to recover virus from the cells, for example at the end of the process and/or to recover virus from cells that have been removed from the culture.

[0291] “Wherein the isolation is not subsequent to a cell lysis step” as employed herein is intended to refer to the fact the harvesting at at least one time point in manufacturing process does not comprise a specific lysis step. That is to say a step where the conditions are designed to lyse all or most of the cells in the culture, for example does not employ a chemical lysis step, an enzymatic lysis step, a lysis buffer step, a mechanical lysis step or a physical lysis step such as centrifuging or freeze-thawing.

[0292] Most as employed herein refers to a large majority, for example 80, 90, 91, 92, 93, 94, 95, 96, 97, 98 or 99%.

[0293] In one embodiment after the virus is released from the cells into the supernatant then harvesting is commenced and is performed continuously from that point onwards (for example by recovery from the circulating media) or is harvested at discrete time points, for example 40 to 50 hours, 60 to 70 hours, 80 to 100 hours, 120 to 150 hours, 160 to 200 hours, 200 to 250 or a combination of the above. A combination where a certain amount, but not all, of virus is being removed from the supernatant continuously and at certain time points the amount of virus being removed is increased or decreased.

[0294] Harvesting of virus should leave sufficient virus in the culture to continue viral replication. This, for example can be achieved my monitoring the MOI and keeping it within a range described herein.

[0295] In one embodiment all the virus is harvested at one time point at the end of the process.

[0296] In one embodiment all the virus is not harvested at one time point at the end of the process.

[0297] In one embodiment the process of the present disclosure comprises one or more filtration steps. Filtration can be selected as appropriate to retain cells and contaminants thereby allowing virus to pass through the pores of the filter. Alternatively the filtration may be selected to retain the virus and allow the contaminants through. In one embodiment a combination of filtration techniques are employed in the process of the present disclosure.

[0298] The virus may be removed from the supernatant by filtration, for example filters may be employed with pores sufficient to allow virus through but retain cells and other cell culture components (contaminants). In one embodiment the filter employed in the range 0.1 to 10 microns, for example 0.2 microns. In one embodiment graduated filtration is employed, for example a 10 micron filter is followed by a smaller filter for example in the range 1 to 5 microns, which is in turn followed by a smaller filter such as 0.2 microns or similar.

[0299] In one embodiment diafitration, such as tangential flow filtration, is employed. The size of the filter and conditions can be selected to selectively extract the virus. Examples of filters that may be suitable include TFF membrane 300K NMWC and equivalents thereof.

[0300] In one embodiment diafiltration systems having a cut-off of about 300 kDa may be appropriate because this generally allows retention of 90% or more of the virus particles whilst removing contamination.

[0301] The supernatant remaining after extraction of the part or all of the virus contained therein can, if appropriate, be further processed to extract more virus and increase the overall yield, can be recycled into the culture system optionally in combination with an amount of fresh media or components thereof, or discarded, or a combination thereof.

[0302] In one embodiment fractions (including one fraction) of virus isolated from the cell (as opposed to virus removed from the supernatant) have at least one purification step performed on them before addition to the virus isolated from the supernatant.

[0303] In one embodiment fractions (including one fraction) of virus isolated from the cell (as opposed to virus removed from the supernatant) do not have at least one purification step performed on them before addition to the virus isolated from the supernatant.

[0304] In one embodiment over 90% of the virus is present in the supernatant at the 48 hour time point and multiples thereof, for example, 91, 92, 93, 94, 95, 96, 97, 98, 99 or 100%, such as 95% or more, particularly 98% or more.

[0305] In one embodiment significant amounts of virus are in media post 38 hours. For example, over 50%, particularly over 70% of the virus is in the media post 38 hours and multiples thereof, for example 76, 114, 152, 190, 228 etc.

[0306] In one embodiment 50% or more, such as 55, 60, 65, 70, 75% or more of the virus is in the supernatant by about 65 hours.

[0307] In one embodiment 70% or more, such as 75, 76, 77, 78, 79, 80% or more of the virus is in the supernatant by about 72 hours.

[0308] In one embodiment 80% or more, such as 85, 86, 87, 88, 89, 80% or more of the virus is in the supernatant by about 96 hours.

[0309] In one embodiment there is less than 10% detectable virus in the CVL pellet at the 64 hour time point, i.e. post 64 hours, such as 9, 8, 7, 6, 5, 4, 3, 2, 1% detectable virus. CVL as employed herein means the crude viral lysate.

[0310] In one embodiment the virus after replication exits the cells about the same time for substantially all the cells, such that there are specific time points when virus in the supernatant peaks. Unless the context indicates otherwise virus replication cycle as employed herein refers to virus peaks in the process, the first viral peak is indicative of the end of the first virus replication cycle and the start of the second virus replication cycle and so on. This profile of process may be achieved by using cells cultured at the same time to ensure they are at the same or approximately the same stage of their life cycle at any given moment in time. Alternatively a range of different cells can be employed to flatten this profile and provide replicated virus on a continuous basis.

[0311] The virus levels in the media or supernatant can be monitored by HPLC or other technique.

[0312] Generally cells added to the culture will be the same type of cells being employed in the culture.

[0313] Cells added to the culture may have been pre-cultured to render them more suitable for addition to the main culture, for example to ensure that they are at a compatible stage of the cell life life-cycle to be mixed with the cells of the main culture.

[0314] Advantageously, if the viable cell levels are increased, as virus replication increases the absolute number of virus particles then cells are available for the virus to infect, thereby providing a very efficient process. In one embodiment other properties of the population are changed by changing or adding cells, for example membrane permeability may be increased.

[0315] In one embodiment the cells are maintained under conditions established to support and maintain log phase growth during infection and replication of virus. Thus in one embodiment at least a proportion of the cell population is in a logarithmic growth phase at any given time in the process, for example 10 to 80%, such as 20 to 50% of the cells are in a growth phase. Logarithmic growth phase as used herein means cells are proliferating exponentially under growth media conditions where available nutrients, substrates and inhibitory by products released by cells are not limiting factors.

[0316] Culturing cells may employ a perfusion culture, fed batch culture, batch culture, a steady state culture, a continuous culture or a combination of one or more of the same as technically appropriate, in particular a perfusion culture.

[0317] In one embodiment the process is a perfusion process, for example a continuous perfusion process.

[0318] “Derived from” as employed herein refers to, for example where a DNA fragment is taken from an adenovirus or corresponds to a sequence originally found in an adenovirus. This language is not intended to limit how the sequence was obtained, for example a sequence employed in a virus according to the present disclosure may be synthesised.

[0319] In one embodiment the derivative has 100% sequence identity over its full length to the original DNA sequence.

[0320] In one embodiment the derivative has 95, 96, 97, 98 or 99% identity or similarity to the original DNA sequence.

[0321] In one embodiment the derivative hybridises under stringent conditions to the original DNA sequence.

[0322] As used herein, “stringency” typically occurs in a range from about Tm (melting temperature)-50° C. (5° below the Tm of the probe) to about 20° C. to 25° C. below Tm. As will be understood by those of skill in the art, a stringent hybridization can be used to identify or detect identical polynucleotide sequences or to identify or detect similar or related polynucleotide sequences. As herein used, the term “stringent conditions” means hybridization will generally occur if there is at least 95%, such as at least 97% identity between the sequences.

[0323] As used herein, “hybridization” as used herein, shall include “any process by which a polynucleotide strand joins with a complementary strand through base pairing” (Coombs, J., Dictionary of Biotechnology, Stockton Press, New York, N.Y., 1994).

[0324] Advantageously, the present process may simplify downstream processing of the virus because of the lower starting concentration of contaminating DNA or proteins from the cells because a cell lysis step can be avoided. This may result in cost savings because reagents, equipment and time employed in downstream processing may be reduced. It may also result in greater purity with lower end concentrations of contaminating DNA and/or a lower concentration of large fragments of contaminating cellular DNA and proteins.

[0325] Furthermore, virus exposure to cell enzymes is minimised by avoiding cell lysis, which minimises the exposure of the virus to potential degradants, such as nucleases from the cell. This may result in higher virus stability and/or potency as measured, for example by infectivity.

[0326] Interestingly, after exiting the cells the virus of the present disclosure does not adhere to the cells and so can be readily recovered from the supernatant. This may be a phenomenon which is characteristic of the certain viruses described herein which facilitates the current process. In contrast, wild-type Ad5 is thought to adhere to cells. In fact, results have shown that substantially no wild-type Ad5, viral particles are present in the supernatant the time frames discussed herein.

[0327] Whilst not wishing to be bound by theory, in one embodiment the ability to exit the cell and not adhere thereto and/or a rapid viral replication cycle may be associated with the chimeric E2B region and/or deletion of part of the E3 and/or deletion of the E4 region.

[0328] Whilst not wishing to be bound by theory, in one embodiment the ability to exit the cell and not adhere thereto and/or a rapid viral replication cycle may be associated with the group B capsid, for example Ad11 capsid.

[0329] In one embodiment the lack of adherence to the cells may be related to the hexon and fibre of the oncolytic virus, for example in this respect virus capsids from group B adenoviruses, such as Ad11 may be particularly advantageous for replication competent viruses and chimeric viruses of the present disclosure.

[0330] Rapid virus replication cycle as employed herein refers to a cycle complete such that at least some of the virus is excreted into the supernatant in a period 50 hours or less after infection.

[0331] In one embodiment known standard systems are employed to the process the viruses prepared by the methods described herein.

[0332] In one embodiment, for example where the continuous process is in fact non-stop, i.e. run for very prolonged campaigns, such as week and months as opposed to days, then the culture vessel may be adapted to provide in-line tangential flow filtration of the culture media to avoid build-up of contaminants, such as DNA and cell debris. One possible arrangement is show in FIG. 2, wherein a tangential flow filtration system is provided adjoined to culture vessel. The interface in between the culture vessel and the tangential flow system is shown a flat interface in FIG. 2. However the interface may be any suitable shape, for example the tangential flow filtration may be arranged as jacket around the culture vessel.

[0333] The interface with the vessel is a selectively permeable membrane, referred to a tangential flow filter membrane. In one embodiment the membrane is 300K NMWC TFF.

[0334] The arrangement is FIG. 2 is only an example of a suitable arrangement, for example media post viral extraction may be recycled into the culture, pumps can be arranged differently.

[0335] Thus in one embodiment the tangential flow system associated with the culture vessel removes contamination from the culture. Thus in one embodiment the cell culture vessel comprises a tangential flow interface, for example maintained at a pressure differential to allow removal of cell debris and contaminants from the culture, thereby prolonging the period over which the culture can be maintained.

[0336] In one embodiment the tangential flow system associated with the culture vessel removes virus from the culture, and thus can be employed for harvesting virus.

[0337] The separation system may remove virus as a primary recovery of virus or secondary recover. The separation system may also have an exit to waste.

[0338] In one embodiment the separation system may be absent.

[0339] Vessel as employed herein refers to any container suitable for use to culture cells in, for example a culture bag, pot, bottle, cube, tube, bioreactor or similar. In one embodiment the vessel may comprise a gas permeable membrane.

[0340] In one embodiment the culture is a suspension culture. In another embodiment the culture is an adherent culture.

[0341] Mammalian cells are cell derived from a mammal. In one embodiment the mammalian cells are selected from the group comprising HEK, CHO, COS-7, HeLa, Vero, A549, PerC6 and GMK, in particular HEK293 or A549 cells. In one embodiment the cells added to the culture are quick growing cells, for example 293-F. In one embodiment the cells/cell line employed is not an encapsidating cell line, that is a packaging cell line that provide virus transgenes to facilitate viral replication.

[0342] Adherent cells cultivated on, for example polymer spheres (microbeads also referred to as microcarriers) or attached to hollow-fibres can be employed in suspension in stirred tank bioreactors.

[0343] At least HEK, CHO and A549 can be rendered adherent cell lines.

[0344] Culturing mammalian cells as employed herein refers to the process where cells are grown under controlled conditions ex vivo. Suitable conditions are known to those in the art and may include temperatures such as 37° C. The CO₂ levels may need to be controlled, for example kept at a level of less of 10%, such as 5%. Details of the same are given in the text Culture of Animal Cells: A Manual of Basic Techniques and Specialised Applications Edition Six R. Ian Freshney, Basic Cell Culture (Practical Approach) Second Edition Edited by J. M. Davis.

[0345] Usually the cells will be cultured to generate sufficient numbers before infection with the virus of the present disclosure. These methods are known to those skilled in the art or are readily available in published protocols or the literature.

[0346] Generally the cells will be cultured on a commercial scale, for example 5 L, 10 L, 15 L, 20 L, 25 L, 30 L, 35 L, 40 L, 45 L, 50 L, 100 L, 200 L, 300 L, 400 L, 500 L, 600 L, 700 L, 800 L, 900, 1000 L or similar. In one embodiment the scale of the continuous process according to the present disclosure is 150 L or less.

[0347] The viruses of the present disclosure, such as chimeric oncolytic viruses and/or group B replication competent adenoviruses, have different properties to those of adenoviruses used as vectors such as Ad5, this includes the fact that they can be recovered from the medium without the need for cell lysis over relatively short periods of culture. This is contrary to what was expected in the art because for a long time it was thought that the adenovirus death protein encoded in the E3 region of Ad5 (a group C virus) was required for the virus to exit the cell. Thus, whilst not wishing to be bound by theory, the group B viruses appear to have mechanisms to exit the cell.

[0348] Furthermore, the viruses of the present disclosure, such as chimeric oncolytic adenoviruses do not seem to associate or adhere the cells after exiting the same, which also facilitates recovery from the supernatant, in particular when the cell culturing conditions are optimised.

[0349] In one embodiment the process is performed at about a temperature below 40° C., for example about 35 to 39° C., such as 37° C.

[0350] In one embodiment the process performed with a carbon dioxide concentration less than 10% for example about 4-6% CO₂, such as 5% CO₂.

[0351] In one embodiment the process is performed at a pH in the range 6 to 8, such as pH 7.4.

[0352] In one embodiment the media containing the virus, such as the chimeric oncolytic viral particles is filtered to remove the cells and provide crude supernatant for further downstream processing.

[0353] In one embodiment a tangential flow filter is employed.

[0354] In one embodiment medium is filtered employing Millipore's Millistak+® POD system with cellulose based depth filters. Millistak+® depth filter medium is offered in a scalable, disposable format, the Pod Filter System. It is ideal for a wide variety of primary and secondary clarification applications, including cell cultures.

[0355] Millistak+® Pod filters are available in three distinct series of media grades in order to meet specific application needs. Millistak+® DE, CE and HC media deliver optimal performance through gradient density matrix as well as positive surface charge properties. In one embodiment the filtration is effected using tangential flow technology, for example employing the Cogent™ M system comprising a Pellicon Mini cassette membrane holder, pressure sensors, 10 litre recycle tank with mixer, retentate flow meter, weigh scale, feed pump, transfer pump, piping and valves. Control and operation of the system is manual with an exception of semi-automatic diafiltration/concentration. The operator has manual control of pump speeds, all valves and operational procedures. The virus can also, if desired, be formulated into the final buffer in this step.

[0356] In one embodiment the downstream processing comprises of a clarification assembly consisting of an 8 μm capsule filter (Sartopure PP2 8 μm) followed by a 3.0 μm/0.8 μm capsule filter (Sartoclean CA, 3.0 μm/0.8 μm, 0.2 m²) in series.

[0357] Thus in one embodiment in the filtration step, concentrated and conditioned adenovirus material is provided in a final or near final formulation.

[0358] In one embodiment the process comprises two or more filtration steps.

[0359] In one embodiment the downstream processing comprises Millistak+POD system 35 CE and 50 CE cassettes followed by an opticap XL 10 express 0.5/0.2 um membrane filter in series.

[0360] In one embodiment the process further comprises a purification step, selected from a CsCl gradient, chromatography step such as size exclusion chromatography, ion-exchange chromatography in particular anion-exchange chromatography, and a combination thereof.

[0361] Ion exchange chromatography binds DNA very strongly and typically is the place were any residual DNA is removed. The ion exchange resin/membrane binds both the virus and the DNA and during salt gradient elusion the virus normally elutes off the column first (low salt gradient) and the DNA is eluted at a much higher salt concentration since the interaction of the DNA with the resin is stronger than the virus.

[0362] In one embodiment the chromatography step or steps employ monolith technology, for example available from BIA Separations.

[0363] In one embodiment Sartobind Q (quaternary amine membrane purification process) is employed as a purification step.

[0364] In one embodiment Source Q RESIN is employed in a purification step.

[0365] In one embodiment Sartobind Q is employed followed by Source Q RESIN in downstream processing of the isolated virus.

[0366] In one embodiment Sartobind Q is employed followed by CIM® monolithic columns (CIM-QA; quaternary amine membrane purification process) in downstream processing of the isolated virus.

[0367] In one embodiment Source Q is employed in the purification step.

[0368] During chromatography stages of the manufacturing process (i.e. capture and polishing steps) several columns may be connected in series such that the first column can be over loaded beyond the binding capacity without loss of material since the product that breaks through from the first column is captured on the second column in the series. The principle of continuous multicolumn manufacturing process thus creates a (simulated) movement of the columns in the opposite direction to the product flow referred to as the countercurrent chromatography process.

[0369] Three columns or more may be required for the countercurrent chromatography process, such that the first column (which has been over loaded beyond the binding capacity) has sufficient time to be processed through the wash step, elution, regeneration and re-equilibration step and then brought back in line to capture product whilst another (product saturated) column in the series undergoes the wash to re-equilibration steps outlined above. The columns are cycled many times throughout each purification run, usually for the life time of the chromatography media.

[0370] In one embodiment after purification the virus prepared contains less than 80 ng/mL of contaminating DNA, for example between 60 ng/mL and 10 ng/mL.

[0371] In one embodiment substantially all the contaminating DNA fragments are 700 base pairs or less, for example 500 bp or less, such as 200 bp or less.

[0372] In one embodiment the residual host cell protein content in the purified virus product in 20 ng/mL or less, for example 15 ng/mL or less, in particular when measured by an ELISA assay.

[0373] In one embodiment the residual tween in the purified virus product is 0.1 mg/mL or less, such as 0.05 mg/mL or less.

[0374] Benzonase (Merck), 100 U/ml, is used to digest host cell DNA. Benzonase treatment is done for 30 min in +37° C. Benzonase is stopped with high salt incubation for 1 hour at RT. The use of benzonase to degrade cellular DNA may also be avoided or reduced if desired, which may be advantageous. In particular, removal of the benzonase and testing to show the absence of residual benzonase can be avoided. In one embodiment benzonase is not employed in the present process.

[0375] In one embodiment the residual benzonase content in the purified virus product is 1 ng/mL or less, such as 0.5 ng/mL or less.

[0376] In the context of the present application, medium and media may be used interchangeably.

[0377] Oncolytic viruses are those which preferentially infect cancer cells and hasten cell death, for example by lysis of same, or selectively replicate in the cancer cells.

[0378] Viruses which preferentially infect cancer cells are viruses which show a higher rate of infecting cancer cells when compared to normal healthy cells.

[0379] A chimeric adenovirus of the present disclosure can be evaluated for its preference for a specific tumor type by examination of its lytic potential in a panel of tumor cells, for example colon tumor cell lines include HT-29, DLD-1, LS174T, LS1034, SW403, HCT116, SW48, and Colo320DM. Any available colon tumor cell lines may be employed for such an evaluation.

[0380] Prostate cell lines include DU145 and PC-3 cells. Pancreatic cell lines include Panc-1 cells. Breast tumor cell lines include MDA231 cell line and ovarian cell lines include the OVCAR-3 cell line. Lung cancer cell lines include A549. Hemopoietic cell lines include, but are not limited to, the Raji and Daudi B-lymphoid cells, K562 erythroblastoid cells, U937 myeloid cells, and HSB2 T-lymphoid cells. Other available tumor cell lines may be equally useful.

[0381] Oncolytic viruses including those which are non-chimeric, for example Ad11, such as Ad11p can similarly be evaluated in these cell lines.

[0382] In one embodiment the chimeric oncolytic virus is apoptotic, that is hastens programmed cell death.

[0383] In one embodiment the chimeric oncolytic virus is cytolytic. The cytolytic activity of chimeric oncolytic adenoviruses of the disclosure can be determined in representative tumor cell lines and the data converted to a measurement of potency, for example with an adenovirus belonging to subgroup C, preferably Ad5, being used as a standard (i.e. given a potency of 1). A suitable method for determining cytolytic activity is an MTS assay (see Example 4, FIG. 2 of WO2005/118825 incorporated herein by reference).

[0384] In one embodiment the chimeric oncolytic adenovirus of the present disclosure causes cell necrosis.

[0385] In one embodiment the chimeric oncolytic virus has an enhanced therapeutic index for cancer cells.

[0386] Therapeutic index” or “therapeutic window” refers to a number indicating the oncolytic potential of a given adenovirus which may be determined by dividing the potency of the chimeric oncolytic adenovirus in a relevant cancer cell line by the potency of the same adenovirus in a normal (i.e. non-cancerous) cell line.

[0387] In one embodiment the chimeric oncolytic virus has an enhanced therapeutic index in one or more cancer cells selected from the group comprising colon cancer cells, breast cancer cells, head and neck cancers, pancreatic cancer cells, ovarian cancer cells, hemopoietic tumor cells, leukemic cells, glioma cells, prostate cancer cells, lung cancer cells, melanoma cells, sarcoma cells, liver cancer cells, renal cancer cells, bladder cancer cells and metastatic cancer cells.

[0388] A chimeric oncolytic adenovirus as employed herein refers to an adenovirus comprising an E2B region which has DNA sequence derived from at least two distinct adenovirus serotypes and wherein the virus is oncolytic.

[0389] There are currently about 56 adenovirus serotypes. Table 1 shows the division of adenovirus serotypes:

| Subgroup | Adenoviral Serotype |
|---|---|
| A | 12, 18, 31 |
| B | 3, 7, 11, 14, 16, 21, 34, 35, 50, 55 |
| C | 1, 2, 5, 6 |
| D | 8-10, 13, 15, 17, 19, 20, 22-30, 32, 33, |
| | 36-39, 42-51, 53, 54, 56 |
| E | 4 |
| F | 40, 41 |
| G | 52 |

[0390] The E2B region is a known region in adenoviruses and represents about 18% of the viral genome. It is thought to encode protein IVa2, DNA polymerase and terminal protein. In the Slobitski strain of Ad11 (referred to as Ad11p) these proteins are encoded at positions 5588-3964, 8435-5067 and 10342-8438 respectively in the genomic sequence and the E2B region runs from 10342-3950. The exact position of the E2B region may change in other serotypes but the function is conserved in all human adenovirus genomes examined to date as they all have the same general organisation.

[0391] In one embodiment the virus of the present disclosure, such as a chimeric oncolytic virus has a subgroup B hexon.

[0392] In one embodiment the virus of the disclosure, such as a chimeric oncolytic virus has an Ad11 hexon, such as an A11p hexon.

[0393] In one embodiment the virus of the disclosure, such as a chimeric oncolytic virus has a subgroup B fibre.

[0394] In one the virus of the disclosure, such as a chimeric oncolytic virus has an Ad11 fibre, such as an A11p fibre.

[0395] In one embodiment the virus of the disclosure, such as a chimeric oncolytic virus has fibre and hexon proteins from the same serotype, for example a subgroup B adenovirus, such as Ad11, in particular Ad11p.

[0396] In one embodiment the virus of the disclosure, such as a chimeric oncolytic virus has fibre, hexon and penton proteins from the same serotype, for example Ad11, in particular Ad11p, for example found at positions 30811-31788, 18254-21100 and 13682-15367 of the genomic sequence of the latter.

[0397] A virus of a distinct serotype to a first virus may be from the same subgroup or a different subgroup but will always be from a different serotype. In one embodiment the combinations are as follows in (first Ad serotype: second Ad serotype): AA, AB, AC, AD, AE, AF, AG, BB, BC, BD, BF, BG, CC, CD, CE, CF, CG, DD, DE, DF, DG, EE, EF, EG, FF, FG and GG.

[0398] In one embodiment the chimeric E2B region is derived from Ad3 and Ad11 (in particular Ad11p).

[0399] In one embodiment the E2B region is the sequence shown in SEQ ID NO: 47 herein.

[0400] In one embodiment the virus has a hexon and fibre from a group B adenovirus, for example Ad11 and in particular wherein the virus is ColoAd1.

[0401] In one embodiment there is provided isolated purified EnAd wherein the contaminating DNA content is less than 80 ng/mL.

[0402] EnAd is disclosed in WO2005/118825 and the full sequence for the virus is provided herein, namely SEQ ID No: 12.

[0403] Alternative chimeric oncolytic viruses include OvAd1 and OvAd2, which are SEQ ID NO: 2 and 3 respectively disclosed in WO 2008/080003 and incorporated herein by reference.

[0404] In one embodiment the virus of the disclosure, such as the chimeric oncolytic virus of the present disclosure comprises one or more restrictions site into which a transgene. In one embodiment the restriction site is in or is adjacent to a late gene, for example L5.

[0405] In one embodiment the virus of the disclosure, such as the chimeric oncolytic virus of the present disclosure comprises one or more transgenes, for example one or more transgenes encoding therapeutic peptide(s) or protein sequence(s).

[0406] In one embodiment the chimeric oncolytic virus encodes at least one transgene. Suitable transgenes include so called suicide genes such as p53; polynucleotide sequences encoding cytokines such as IL-2, IL-6, IL-7, IL-12, IL-15, IL-18, IL-21, GM-CSF or G-CSF, an interferon (e.g. type I interferon such as IFN-alpha or beta, type II interferon such as IFN-gamma), a TNF (e.g. TNF-alpha or TNF-beta), TGF-beta, CD22, CD27, CD30, CD40, CD120; a polynucleotide encoding a monoclonal antibody, for example trastuzamab, cetuximab, panitumumab, pertuzumab, epratuzumab, an anti-EGF antibody, an anti-VEGF antibody and anti-PDGF antibody, an anti-FGF antibody, checkpoint inhibitor antibodies including anti-CTLA4, anti-PD1 and anti-PDL1 antibodies, or target antigen-binding fragments thereof, or tumour associated antigens such as NY-ESO1, WT1, MAGE-A3 and others known in the art.

[0407] A range of different types of transgenes, and combinations thereof, are envisaged that encode molecules that themselves act to modulate tumour or immune responses and act therapeutically, or are agents that directly or indirectly inhibit, activate or enhance the activity of such molecules. Such molecules include protein ligands or active binding fragments of ligands, antibodies (full length or fragments, such as Fv, ScFv, Fab, F(ab)′2 or smaller specific binding fragments), or other target-specific binding proteins or peptides (e.g. as may be selected by techniques such as phage display etc), natural or synthetic binding receptors, ligands or fragments, specific molecules regulating the transcription or translation of genes encoding the targets (e.g. siRNA or shRNA molecules, transcription factors). Molecules may be in the form of fusion proteins with other peptide sequences to enhance their activity, stability, specificity etc (e.g. ligands may be fused with immunoglobulin Fc regions to form dimers and enhance stability, fused to antibodies or antibody fragments having specificity to antigen presenting cells such as dendritic cells (e.g. anti-DEC-205, anti-mannose receptor, anti-dectin). Transgenes may also encode reporter genes that can be used, for example, for detection of cells infected with the “insert-bearing adenovirus”, imaging of tumours or draining lymphatics and lymph nodes etc.

[0408] In one embodiment the cancer cell infected with the chimeric oncolytic virus is lysed releasing the contents of the cell which may include the protein encoded by a transgene.

[0409] In one embodiment 40 to 93% or more of the total virus replicated in the cells is recoverable from the media, for example 41, 42, 43, 44, 45, 46, 47, 48, 49, 50, 51, 52, 53, 54, 55, 56, 57, 58, 59, 60, 61, 62, 63, 64, 65, 66, 67, 68, 69, 70, 71, 72, 73, 74, 75, 76, 77, 78, 79, 80, 81, 82, 83, 84, 85, 86, 87, 88, 89, 90, 91 or 92% of the total virus is recoverable, such as 94, 95, 96, 97, 98, 99 or 100% of the total virus recoverable.

[0410] In one embodiment the process is a GMP manufacturing process, such as a cGMP manufacturing process.

[0411] In one embodiment the process further comprises the step formulating the virus in a buffer suitable for storage.

[0412] In one embodiment the formation is suitable for storage at room temperature.

[0413] In one embodiment the formation is suitable for storage at 4° C. or below.

[0414] In one embodiment the formation is frozen.

[0415] In one embodiment the present disclosure extends to virus or viral formulations obtained or obtainable from the present method.

[0416] In the context of this specification “comprising” is to be interpreted as “including”.

[0417] Aspects of the invention comprising certain elements are also intended to extend to alternative embodiments “consisting” or “consisting essentially” of the relevant elements.

[0418] Where technically appropriate, embodiments of the invention may be combined, even if they relate to different independent aspects of the disclosure because the basic technology underlying all the inventions herein is the same.

[0419] Embodiments are described herein as comprising certain features/elements. The disclosure also extends to separate embodiments consisting or consisting essentially of said features/elements.

[0420] Technical references such as patents and applications are incorporated herein by reference.

[0421] Any embodiments specifically and explicitly recited herein may form the basis of a disclaimer either alone or in combination with one or more further embodiments.

[0422] The present invention is further described by way of illustration only in the following examples, which refer to the accompanying Figures.

### Paragraphs

[0423] 1. A continuous process for the manufacture of:
   [0424] a replication competent adenovirus; or
   [0425] a replication capable or deficient chimeric oncolytic adenovirus having a genome comprising an E2B region, wherein said E2B region comprises a nucleic acid sequence derived from a first adenoviral serotype and a nucleic acid sequence derived from a second distinct adenoviral serotype; wherein said first and second serotypes are each selected from the adenoviral subgroups B, C, D, E, or F, wherein the process comprises the steps:
   [0426] A) continuously culturing, in a vessel, mammalian cells infected with the adenovirus in the presence of media suitable for supporting the cells such that the virus replicates, wherein the cells are capable of supporting viral replication, and
   [0427] B) isolating from the media the virus produced from step a) wherein the isolation of virus is not subsequent to a cell lysis step,
   [0428] wherein viable cells for virus infection and production are maintained in the vessel at a level suitable for replicating the virus for the period of continuous manufacture.
   [0429] OR
[0430] 1. A continuous process for the manufacture of:
   [0431] a type B adenovirus wherein the process comprises the steps:
   [0432] C) continuously culturing, in a vessel, mammalian cells infected with the adenovirus in the presence of media suitable for supporting the cells such that the virus replicates, wherein the cells are capable of supporting viral replication, and
   [0433] D) isolating from the media the virus produced from step a) wherein the isolation of virus is not subsequent to a cell lysis step,
   [0434] wherein viable cells for virus infection and production are maintained in the vessel at a level suitable for replicating the virus for the period of continuous manufacture.
[0435] 2. A process according to paragraph 1, wherein the virus has a hexon and fibre from a group B adenovirus, for example Ad11 and in particular wherein the virus is selected from the group ColoAd1.
[0436] 3. A process according to paragraph 1 or 2, wherein the virus is replication competent.
[0437] 4. A process according to any one of paragraph 1 to 3, wherein the continuous manufacturing period comprises at least two virus replication cycles.
[0438] 5. A process according to paragraph 4, wherein each virus replication cycle is in the range 70 to 300 hours.
[0439] 6. A process according to any one of paragraph 1 to 4, wherein viable cells for virus infection and production are maintained in the vessel at a level to suitable for replicating the virus by the addition further cells to augment the culture.
[0440] 7. A process according to any one of paragraph 1 to 6, wherein the mammalian cells are selected from the group comprising HEK, CHO, HeLa, Vero, PerC6 and GMK, in particular HEK293.
[0441] 8. A process according to any one of paragraph 1 to 7, wherein the culture is a scale of 5 L or more.
[0442] 9. A process according to any one of paragraph 1 to 8, wherein virus during culture is at concentration in the range 40 to 150 ppc, such as 50 to 100 ppc.
[0443] 10. A process according to any one of paragraph 1 to 9, wherein the cells are infected with a starting concentration of virus of 1-9×10⁴ vp/ml or greater, such as 1-9×10⁵, 1-9×10⁶, 1-9×10⁷, 1-9×10⁸, 1-9×10⁹, in particular 4 to 5×10⁶ vp/ml.
[0444] 11. A process according to any one of paragraph 1 to 10, which provides a fraction of oncolytic virus wherein the process comprises a further step such that a second fraction or fractions of the oncolytic virus made by the same of a different process is/are combined with the first fraction.
[0445] 12. A process according to any one of paragraph 1 to 11, wherein a perfusion culture is employed.
[0446] 13. A process according to any one of paragraph 1 to 12, wherein a suspension culture is employed.
[0447] 14. A process according to any one of paragraph 1 to 12, wherein an adhesion culture is employed.
[0448] 15 A process according to any one of paragraph 1 to 14, wherein the process is a GMP manufacturing process.
[0449] 16. A process according to any one of paragraph 1 to 15, wherein the filter is a tangential filter.
[0450] 17. A process according to any one of paragraph 1 to 16, wherein the process further comprises a purification step, selected from a CsCl gradient, chromatography step such as ion-exchange chromatography in particular anion-exchange chromatography, and a combination thereof.
[0451] 18. A process according to any one of paragraph 1 to 17, wherein 40 to 93% of the total virus is recoverable from the media.
[0452] 19. A process for the manufacture of an adenovirus comprises the steps:
   [0453] a. culturing, in a vessel, mammalian cells infected with the adenovirus in the presence of media suitable for supporting the cells such that the virus replicates, wherein the cells are capable of supporting viral replication, wherein the starting seed density of the virus is in the range 1 to 2×10⁶ vp/ml (such as 1×10⁶ vp/ml) and the multiplicity of infection is in the range 5 to 20, such as 10 to 15, in particular 12.5 vp/cell; and
   [0454] b. performing a lysis step in the period 24 to 75 hours post virus infection to harvest the virus from the cells, for example where the lysis step is performed at 65 to 70 hours post infection, such as 66, 67, 68 or 69 hours post infection.
[0455] 20. A process according to any one of paragraph 1 to 19, which further comprises formulating the virus in a buffer suitable for storage.
[0456] 21. A virus or formulation obtained or obtainable from this process described herein, for example in any one of claims 1 to 20.

### Sequences

[0457] SEQ ID NO: 1 NG-77 virus genome sequence comprising the EnAd genome with a transgene cassette that encodes an anti-VEGF full length antibody inserted in the region B_{Y}. The transgene cassette contains a 5′ branched splice acceptor sequence (bSA), ab heavy chain sequence with 5′ leader, an IRES, an ab light chain sequence with 5′ leader and a 3′ poly(A) sequence.
[0458] SEQ ID NO: 2 NG-135 virus genome sequence comprising the EnAd genome with a transgene cassette that encodes an anti-VEGF full length antibody inserted in the region B_{Y}. The transgene cassette contains a 5′ short splice acceptor sequence (SSA), ab heavy chain sequence with 5′ leader, an IRES, ab light chain sequence with 5′ leader and 3′ poly(A) sequence.
[0459] SEQ ID NO: 3 A virus genome sequence comprising a transgene cassette that encodes an anti-VEGF full length antibody inserted in the region B_{Y}. The transgene cassette contains a SSA, ab heavy chain sequence with 5′ leader, a SSA, and ab light chain sequence with 5′ leader.
[0460] SEQ ID NO: 4 A virus genome sequence comprising a transgene cassette that encodes an anti-VEGF full length antibody inserted in the region B_{Y}. The transgene cassette contains a SSA, ab heavy chain sequence with 5′ leader, a SSA, ab light chain sequence with 5′ leader and 3′ poly(A) sequence.
[0461] SEQ ID NO: 5 NG-74 virus genome sequence comprising the EnAd genome with a transgene cassette that encodes an anti-VEGF ScFv inserted in the region B_{Y}. The transgene cassette contains a bSA, anti-VEGF ScFv sequence with 5′ leader and 3′ poly(A) sequence.
[0462] SEQ ID NO: 6 NG-78 virus genome sequence comprising the EnAd genome with a transgene cassette that encodes an anti-VEGF ScFv with a C-terminal His₆ tag, inserted in the region B_{Y}. The transgene cassette contains a bSA, anti-VEGF ScFv sequence with 5′ leader and 3′ 6×histidine sequence and a poly(A) sequence.
[0463] SEQ ID NO: 7 NG-76 virus genome sequence comprising the EnAd genome with a transgene cassette that encodes an anti-VEGF ScFv with a C-terminal His₆ tag, inserted in the region B_{Y}. The transgene cassette contains a CMV promoter, anti-VEGF ScFv sequence with 5′ leader and 3′ 6×histidine sequence and a poly(A) sequence.
[0464] SEQ ID NO: 8 NG-73 virus genome sequence comprising the EnAd genome with a transgene cassette that encodes an anti-VEGF ScFv inserted in the region B_{Y}. The transgene cassette contains a CMV promoter, anti-VEGF ScFv sequence with 5′ leader and 3′ poly(A) sequence.
[0465] SEQ ID NO: 9 NG-134 virus genome sequence comprising the EnAd genome with a transgene cassette encoding an anti-VEGF full length antibody inserted into the region B_{Y}. The transgene cassette contains a CMV promoter, ab heavy chain sequence with 5′ leader, an IRES, ab light chain sequence with 5′ leader and a 3′ poly(A) sequence.
[0466] SEQ ID NO: 10 B_{X} DNA sequence corresponding to and including bp 28166-28366 of the EnAd genome.
[0467] SEQ ID NO: 11 B_{Y} DNA sequence corresponding to and including bp 29345-29379 of the EnAd genome.
[0468] SEQ ID NO: 12 EnAd genome.
[0469] SEQ ID NO: 13 CMV exogenous promoter.
[0470] SEQ ID NO: 14 PGK exogenous promoter.
[0471] SEQ ID NO: 15 CBA exogenous promoter.
[0472] SEQ ID NO: 16 Short splice acceptor (SSA). Null sequence
[0473] SEQ ID NO: 17 splice acceptor (SA).
[0474] SEQ ID NO: 18 branched splice acceptor (bSA).
[0475] SEQ ID NO: 19 Internal Ribosome Entry sequence (IRES).
[0476] SEQ ID NO: 20 polyadenylation sequence.
[0477] SEQ ID NO: 21 Leader sequence (HuVH).
[0478] SEQ ID NO: 22 Leader sequence (HG3).
[0479] SEQ ID NO: 23 Histidine tag.
[0480] SEQ ID NO: 24 V5 tag.
[0481] SEQ ID NO: 25 P2A peptide.
[0482] SEQ ID NO: 26 F2A peptide.
[0483] SEQ ID NO: 27 E2A peptide.
[0484] SEQ ID NO: 28 T2A peptide.
[0485] SEQ ID NO: 29 anti-VEGF ab VH chain amino acid sequence.
[0486] SEQ ID NO: 30 anti-PD-L1 antibody VH chain amino acid sequence.
[0487] SEQ ID NO: 31 anti-VEGF ab VL chain amino acid sequence.
[0488] SEQ ID NO: 32 anti-PD-L1 antibody VL chain amino acid sequence.
[0489] SEQ ID NO: 33 human IgG1 constant heavy chain amino acid sequence.
[0490] SEQ ID NO: 34 human IgG1 modified constant heavy chain amino acid sequence.
[0491] SEQ ID NO: 35 human kappa constant light chain amino acid sequence.
[0492] SEQ ID NO: 36 anti-VEGF ScFv amino acid sequence.
[0493] SEQ ID NO: 37 anti-PD-L1 ScFv amino acid sequence.
[0494] SEQ ID NO: 38 Green fluorescent protein amino acid sequence.
[0495] SEQ ID NO: 39 Luciferase amino acid sequence.
[0496] SEQ ID NO: 40 Human Tumour necrosis factor alpha (TNFα) amino acid sequence.
[0497] SEQ ID NO: 41 Human Interferon gamma (IFNγ) amino acid sequence.
[0498] SEQ ID NO: 42 Human Interferon alpha (IFNα) amino acid sequence.
[0499] SEQ ID NO: 43 human cancer/testis antigen 1 (NY-ESO-1) amino acid sequence.
[0500] SEQ ID NO: 44 human MUC-1 amino acid sequence.
[0501] SEQ ID NO: 45 A Kozak sequence. gccaccatg (Null sequence)
[0502] SEQ ID NO: 46 NG-177 virus genome sequence comprising the EnAd genome with a transgene cassette. encoding an anti-PD-L1 full length antibody inserted into the region B_{Y}. The transgene cassette contains a CMV promoter, ab heavy chain sequence with 5′ leader, an IRES, ab light chain sequence with 5′ leader and a 3′ poly(A) sequence.
[0503] SEQ ID NO: 47 DNA sequence corresponding to E2B region of the EnAd genome (bp 10355-5068).
[0504] SEQ ID NO: 48 NG-167 virus genome sequence comprising the EnAd genome with a transgene cassette that encodes an anti-VEGF ScFv with a C-terminal His₆ tag, inserted in the region B_{Y}. The transgene cassette contains a 5′ SSA, anti-VEGF ScFv sequence with 5′ leader and a 3′ poly(A) sequence.
[0505] SEQ ID NO: 49 NG-95 virus genome sequence comprising a transgene cassette that encodes the cytokine, IFNγ, inserted in the region B_{Y}. The transgene cassette contains a 5′ CMV promoter, IFNγ cDNA sequence and 3′ poly(A) sequence.
[0506] SEQ ID NO: 50 NG-97 virus genome sequence comprising a transgene cassette that encodes the cytokine, IFNα, inserted in the region B_{Y}. The transgene cassette contains a 5′ CMV promoter, IFNα cDNA sequence and 3′ poly(A) sequence.
[0507] SEQ ID NO: 51 NG-92 virus genome sequence comprising the EnAd genome with a transgene cassette that encodes the cytokine, IFNγ, inserted in the region B_{Y}. The transgene cassette contains a 5′ bSA, IFNγ cDNA sequence and 3′ poly(A) sequence.
[0508] SEQ ID NO: 52 NG-96 virus genome sequence comprising the EnAd genome with a transgene cassette that encodes the cytokine, IFNα, inserted in the region B_{Y}. The transgene cassette contains a 5′ bSA, IFNα cDNA sequence and 3′ poly(A) sequence.
[0509] SEQ ID NO: 53 NG-139 virus genome sequence comprising the EnAd genome with a transgene cassette that encodes the cytokine, TNFα, inserted in the region B_{Y}. The transgene cassette contains a 5′ SSA, TNFα cDNA sequence and 3′ poly(A) sequence.
[0510] SEQ ID NO: 54 Restriction site insert (B_{Y}).
[0511] SEQ ID NO: 55 Restriction site insert (B_{Y}).
[0512] SEQ ID NO: 56 NG-220 virus genome sequence comprising the EnAd genome with a transgene cassette that encodes the tumour associated antigen, NY-ESO-1, inserted in the region B_{Y}. The transgene cassette contains a 5′ PGK promoter, NY-ESO-1 cDNA sequence and 3′ poly(A) sequence.
[0513] SEQ ID NO: 57 NG-217 virus genome sequence comprising the EnAd genome with a transgene cassette that encodes the tumour associated antigen, NY-ESO-1, inserted in the region B_{Y}. The transgene cassette contains a 5′ CMV promoter, NY-ESO-1 cDNA sequence and 3′ poly(A) sequence.
[0514] SEQ ID NO: 58 NG-242 virus genome sequence comprising the EnAd genome with a transgene cassette encoding an anti-CTLA-4 full length antibody inserted into the region B_{Y}. The transgene cassette contains a SSA, ab heavy chain sequence with 5′ leader, an IRES, ab light chain sequence with 5′ leader and a 3′ poly(A) sequence.
[0515] SEQ ID NO: 59 NG-165 virus genome sequence comprising the EnAd genome with a transgene cassette encoding an anti-VEGF full length antibody inserted into the region B_{Y}. The transgene cassette contains a SSA, ab heavy chain sequence with 5′ leader, a P2A peptide sequence, ab light chain sequence with 5′ leader and a 3′ poly(A) sequence.
[0516] SEQ ID NO: 60 NG-190 virus genome sequence comprising the EnAd genome with a transgene cassette encoding an anti-PD-L1 full length antibody inserted into the region B_{Y}. The transgene cassette contains a SSA, ab heavy chain sequence with 5′ leader, a P2A peptide sequence, ab light chain sequence with 5′ leader and a 3′ poly(A) sequence.
[0517] SEQ ID NO: 61 NG-221 virus genome sequence comprising the EnAd genome with a transgene cassette that encodes an anti-PD-L1 ScFv with a C-terminal His₆ tag, inserted in the region B_{Y}. The transgene cassette contains a 5′ SSA, anti-PD-L1 ScFv sequence with 5′ leader and 3′ 6×histidine sequence then poly(A) sequence.
[0518] SEQ ID NO: 62 NG-258 virus genome sequence comprising the EnAd genome with a transgene cassette encoding an anti-VEGF full length antibody inserted into the region B_{Y}. The transgene cassette contains a CMV promoter, ab heavy chain sequence with 5′ leader, a P2A peptide sequence, ab light chain sequence with 5′ leader and a 3′ poly(A) sequence.
[0519] SEQ ID NO: 63 NG-185 virus genome sequence comprising the EnAd genome with unique restriction sites inserted into the B_{X} and B_{Y} regions.
[0520] SEQ ID NO:64 pNG-33 (pColoAd2.4) DNA plasmid, comprising a bacterial origin of replication (p15A), an antibiotic resistance gene (KanR) and the EnAd genome sequence with inserted unique restriction sites in the B_{Y} region.
[0521] SEQ ID NO: 65 pNG-185 (pColoAd2.6) DNA plasmid, comprising a bacterial origin of replication (p15A), an antibiotic resistance gene (KanR) and the EnAd genome sequence with inserted unique restriction sites in the B_{X} and B_{Y} regions.
[0522] SEQ ID NO: 66 NG-sh01 virus genome sequence comprising a transgene cassette encoding an shRNA to GAPDH inserted into the region B_{Y}. The transgene cassette contains a U6 RNA polIII promoter and DNA encoding a shRNA.
[0523] SEQ ID NO: 67 Sodium Iodide symporter (NIS) amino acid sequence.
[0524] SEQ ID NO: 68 NG-280 virus genome sequence comprising a transgene cassette encoding the sodium iodide symporter (NIS) inserted into the region B_{Y}. The transgene cassette contains a 5′ SSA, NIS cDNA sequence and 3′ poly(A) sequence.
[0525] SEQ ID NO: 69 NG-272 virus genome sequence comprising the EnAd genome with a transgene cassette encoding an anti-VEGF ScFv and an anti-PD-L1 ScFv inserted into the region B_{Y}. The transgene cassette contains a SSA, anti-PD-L1 ScFv sequence with 5′ leader and 3′ 6×His tag, a P2A peptide sequence, anti-VEGF ScFv sequence with 5′ leader and 3′ V5-tag and a 3′ poly(A) sequence.
[0526] SEQ ID NO: 70 anti-CTLA-4 VH chain amino acid sequence.
[0527] SEQ ID NO: 71 anti-CTLA-4 VL chain amino acid sequence.
[0528] SEQ ID NO: 72 NG-257 virus genome sequence comprising the EnAd genome with a transgene cassette encoding an anti-VEGF ScFv inserted into the region B_{X}. The transgene cassette contains a bSA, anti-VEGF ScFv sequence with 5′ leader and 3′ 6×His tag then a 3′ poly(A) sequence.
[0529] SEQ ID NO: 73 NG-281 virus genome sequence comprising the EnAd genome with a transgene cassette encoding an anti-VEGF ScFv inserted into the region B_{X} and a second transgene cassette encoding an anti-PD-L1 ScFv inserted into the region B_{Y}. The transgene cassette contains a bSA, anti-VEGF ScFv sequence with 5′ leader and 3′ 6×His tag then a 3′ poly(A) sequence.

### BRIEF DESCRIPTION OF THE FIGURES

[0530] FIG. 1 shows a schematic representation of adenovirus production process

[0531] FIG. 2 shows a cell culturing arrangement for continuous virus manufacture

[0532] FIG. 3 shows a plot of seed density vs yield

[0533] FIG. 4 shows a plot of virus produced per cell at various time points post infection for shake flasks A & B with a Multiplicity of Infection of 12.5 and seed cell density of 1×10⁶ and media change

[0534] FIG. 5 shows a plot of virus produced per cell at various time points post infection for shake flasks C & D with a Multiplicity of Infection of 12.5 and seed cell density of 4×10⁶ and NO media change

[0535] FIG. 6 shows that media changes increase virus yield

[0536] FIG. 7 shows percentage viabilty of cells vs duration of infection

[0537] FIG. 8 shows percentage of cell viability at various times post infection for DOE (??) Fflask A & B with a multiplicity of infection of 12.5 and seed density of 1×10⁶ with media change

[0538] FIG. 9 shows percentage of virus in the supernatant for various time points post infection for DOE flasks A & B with a multiplicity of infection of 12.5 and a seed density of 1×10⁶ with media change

[0539] FIG. 10 shows percentage of virus in the supernatant for various time points post infection for DOE flasks C & D with a multiplicity of infection of 12.5 and a seed density of 4×10⁶ with no media change

[0540] FIG. 11 shows the virus product distribution of a 5 L bioreactor process with cells infected with EnAd at an MOI of 12.5 ppc and a cell density of 1×10⁶ cell/ml.

[0541] FIG. 12 shows the total virus particles produced per cell over time for a process employing a seed density of 1.9×10⁶ cells/ml and the culture was infected with EnAd at 50 ppc

[0542] FIG. 13 shows cell viability over time for a process employing 12.5 ppc and a seed density of 1×10⁶ vp/ml

[0543] FIG. 14 shows cell viability over time for a process employing 50 ppc and a seed density of 1.9×10⁶ vp/ml

[0544] FIG. 15 shows bioreactor data for two process one employing a seed density of 1×10⁶ vp/ml and 12.5 ppc and a second process employing 1.9×10⁶ vp/ml and 50 ppc.

[0545] FIG. 16 shows cell viability over time for a process employing a seed density of 2.2×10⁶ viable cells/mL and 50 ppc infection

[0546] FIG. 17 shows the cell distribution for a process employing a seed density of 2.2×10⁶ viable cells/mL and 50 ppc infection

[0547] FIG. 18 shows viability of control cultures employing a seed density of 2.2×10⁶ viable cells/mL and infected with 50 ppc but no cell suspension removal or addition of fresh cells and medium.

[0548] FIG. 19 shows virus distribution for control cultures employing a seed density of 2.2×10⁶ viable cells/mL and infected with 50 ppc but no cell suspension removal or addition of fresh cells and medium.

[0549] FIG. 20 shows cumulative virus distribution for a process employing a seed density of 2.2×10⁶ viable cells/mL and 50 ppc infection and a control process omitting no cell suspension removal and no addition of fresh cells and medium.

[0550] FIG. 21 shows cell viability over time for a process employing 1.0×10⁶ viable cells/mL and 12.5 ppc infection in a shake flask experiment.

[0551] FIG. 22 shows virus distribution over time for a process employing 1.0×10⁶ viable cells/mL and 12.5 ppc infection in a shake flask experiment.

[0552] FIG. 23 shows cell viability over time for a control process employing 1.0×10⁶ viable cells/mL and 12.5 ppc infection in a shake flask experiment where omitted was cell suspension removal and no addition of fresh cells and medium.

[0553] FIG. 24 shows virus distribution over time for a control process employing 1.0×10⁶ viable cells/mL and 12.5 ppc infection in a shake flask experiment where omitted was cell suspension removal and no addition of fresh cells and medium.

[0554] FIG. 25 shows cumulative total virus yields for a process employing 1.0×10⁶ viable cells/mL and 12.5 ppc infection in a shake flask experiment and a control process where omitted was cell suspension removal and no addition of fresh cells and medium.

[0555] FIG. 26 shows viability of cells in a process with 1.0×10⁶ viable cells/mL and 12.5 ppc infection wherein 95% suspension was removed at various time points & replaced with 47.5 mL uninfected cells in fresh medium cell density of 1.0×10⁶ viable cells/ml.

[0556] FIG. 27 shows virus distribution in a process with 1.0×10⁶ viable cells/mL and 12.5 ppc infection wherein 95% suspension was removed at various time points & replaced with 47.5 mL uninfected cells in fresh medium cell density of 1.0×10⁶ viable cells/ml.

[0557] FIG. 28 shows cumulative total virus in a process with 1.0×10⁶ viable cells/mL and 12.5 ppc infection wherein 95% suspension was removed at various time points & replaced with 47.5 mL uninfected cells in fresh medium cell density of 1.0×10⁶ viable cells/ml and a control process.

### EXAMPLES

### Example 1

[0558] Suspension culture and serum-free media adapted HEK293 cells are grown and expanded to a cell density of 1×10⁶ viable cells/mL at >90% viability in 30 mL EX-CELL serum-free medium in multiple 125 mL shake-flasks at 100 rpm. Some of the flasks are then infected with EnAd virus using a multiplicity of infection (MOI) of 50 virus particles per cell (ppc), while the remainder are left uninfected and are maintained at a cell density between 0.5 and 2×10⁶ viable cells/mL and viability >75% by passaging and used for adding back to the infected cell cultures as indicated below. At various time points post infection, 10 mL of the culture is removed from one of the shake flasks and replaced with 10 mL of uninfected HEK293 cells in fresh EX-CELL medium at 1×10⁶ viable cells/mL and >90% viability. The 10 ml of infected cell culture suspension is centrifuged, the supernatant is stored for analysis and the cell pellet is lysed in 1 mL fresh medium (3× freeze-thaw) which is then clarified by centrifugation prior to storing for analysis. The infected shake flask cultures are then re-cultured until the cell viability decreased to <75% and then cultures are terminated, centrifuging and processed to generate supernatant and cell lysate fractions (as above) which are stored for analysis. Throughout the experiment, small aliquots of suspension (50 μl) are removed from each flask for cell and viability counts using a Burker cell hemacytometer and trypan blue staining, as well as pH measurements.

[0559] Total and infectious EnAd particles in cell lysate and supernatant samples are determined by HPLC and immunostaining infection assays, respectively. The amount of host cell DNA in supernatant samples is determined by real time qPCR and the amount of host cell protein in supernatants is determined using a HEK293 Host Cell Protein ELISA kit using affinity purified goat anti-HEK antiserum. Total EnAd virus yields and levels of host cell DNA and protein were compared for the different processing time points.

### Example 2

[0560] An experimental protocol is employed as described in Example 1 but with 15 mL of the 30 mL suspension being removed at the various time points and replaced with 15 mL uninfected cells in fresh medium instead of 10 mL volumes.

### Example 3

[0561] An experimental protocol is employed as described in Example 1 but in this experiment the fresh uninfected cells added back to the infected culture flasks are resuspended in the virus-containing supernatant removed from that same flask (keeping back 2×500 μl aliquots for analysis) and the volume adjusted to 10 mL prior to adding back to the original flask.

### Example 4

[0562] An experimental protocol is employed as described in Example 3 but with 15 mL of the 30 mL suspension being removed at the different time points and replaced with uninfected cells resuspended in 15 mL of the virus-containing supernatant instead of 10 mL volumes.

### Example 5 to 8

[0563] A set of four further experiments employing the protocols detailed in examples 1-4, but rather than terminating the experiment after one round of suspension removal and replacement with fresh cells, the cultures are maintained on a repeating suspension removal and fresh cell replacement protocol which is continued until maintenance of sufficient viable cells could not be sustained (e.g. due to build-up of cell debris or other cellular products or lack of sufficient nutrients). The frequency of suspension removals and replacements were guided by daily cell counting and viability information together with visual observations.

### Example 9

[0564] A single vial of suspension HEK293 cells are thawed and expanded in shake flasks prior to expansion to a 3 L working volume in a 5 L stirred-tank (glass vessel) bioreactor. The bioreactor controller is set to parameters of 37° C., a pH setpoint of 7.4, dissolved oxygen (DO) of 50, an airflow rate of 100 mL/min, and the agitation at 100 rpm. After the bioreactor system is equilibrated, an initial volume of 1.5 L EX-CELL culture medium is seeded at a viable cell density of 5×10⁵ cells/mL and then expanded to a working volume of 3 L maintaining >90% viability and targeting a density of 1.8 to 2.2×10⁶ cells/mL for infection with EnAd virus. Perfusion and media exchange is initiated at the 3 L stage via hollow fibre tangential flow filtration (TFF). The TFF cartridge had a 0.2 um pore size, 0.5 mm lumen diameter, and a surface area of 790 cm². The TFF assembly was pre-sterilized by autoclaving, and then attached to the bioreactor through the use of a sterile tubing welder. Using a peristaltic pump, the cell culture is recirculated through the TFF system. No backpressure was placed onto the retentate line, while a second peristaltic pump is placed onto the permeate line to provide a measured flow rate out of the system. The perfusion flow rate was set to 1 vessel volume per day (i.e. 3 L/24 h). Once the target cell density was reached, the culture was infected with EnAd at an MOI of 50 ppc.

[0565] In parallel with the bioreactor culture, shake flask cultures of HEK293 cells are established and maintained at a cell density of 0.5-2×10⁶ cells/mL and >90% viability by regular passaging and these cells are used as source of uninfected cells to add into the bioreactor as described.

[0566] Collection of the perfusion permeate was started 48 hours post infection and perfusion permeate samples are taken at regular time points, with non-infected cells from the second suspension flasks added back to the infected cells in the bioreactor, maintaining the cell density at 2×10⁶ cells/mL and cell viability >75% viability. Total and infectious EnAd particles in cell permeate samples were determined by HPLC and immunostaining infection assays, respectively. The amount of host cell DNA in supernatant samples was determined by real time qPCR and the amount of host cell protein in was determined using a HEK293 Host Cell Protein ELISA kit using affinity purified goat anti-HEK antiserum. Total EnAd virus yields and levels of host cell DNA and protein at various time points are compared. The bioreactor culture is actively maintained by the perfusion and fresh uninfected cell replacement procedure until the cell viability could not be maintained above 50%.

[0567] Collected virus-containing permeate samples are pooled and virus purified by a process previously established for GMP manufacture of EnAd virus (outlined below) such that analytical assay data could be compared to appropriate standard virus preparations that had been manufactured without the elements of continuous manufacturing described herein.

### EnAd Virus Purification

[0568] Virus is purified from the cell-free permeate samples collected from the bioreactor at different time points. These permeate samples are first treated with Benzonase® to digest host cell DNA and then concentrated and buffer exchanged by tangential flow filtration (TFF) in preparation for the first of a two-step purification process in the downstream which involves the selective capture and elution of EnAd using two different anion exchange chromatography resins. The first primary capture step (e.g. Sartobind resin) is followed by a second “polishing” purification step (e.g. CIM-Q) to reduce host cell residuals further. The purified virus is then buffer exchanged into the final formulation buffer using a second TFF step prior to the material being stored frozen at −80° C. prior to analyses.

### Example 10

[0569] An experimental protocol as described in example 9 is employed with an MOI of 100 used for the EnAd infection of the HEK293 cells.

### Example 11

[0570] For this experiment, a Design of Experiment (DOE) approach was followed and customised using JMP software in order to evaluate effects of different culture parameters on virus yields and distribution into supernatant or cells. The different variables, range of each variable and responses used for the design of this study are shown in Table 1.

TABLE 1
Variables and responses for design of experiment

| Factors/Variables | Range | Responses |
|---|---|---|
| Multiplicity of | 12.5-50 ppc | Yield: Virus particles/cell |
| Infection (MOI) | | |
| Seeding Density | 1 × 10⁶-4 × 10⁶ cells/ml | Virus distribution: % SN, |
| | | % CVL |
| Media change | Yes/No | % Viability |
| Duration of | 40-96 hrs | Host cell proteins |
| Infection (DOI) | | |

[0571] One vial of HEK293 cells from a working cell bank (WCB) was thawed at 37° C. and expanded in 75 cm² cell culture flasks using Ex-Cell 293 medium supplemented with 6 mM L-glutamine (growth medium). After 4 days of incubation the cells were further passaged (Passage 1) and once a viable cell count of 1.2×10⁷ cells at a density of >1.0×10⁶ viable cells/mL was achieved (approximately 3-5 days after passage 1), the cells were transferred into sterile shaker flasks (Passage 2). The cultures were monitored, and when the cell number had doubled to ≧1.2×10⁶ viable cells/mL, the cells were further passaged approximately every 3 or 4 days. Cell numbers were monitored throughout the cell expansion phase by counting to ensure cell density was maintained at a minimum cell density of 0.5-0.6×10⁶ viable cells/mL.

[0572] Cell counting was performed using automatic cell counter (Invitrogen) and Trypan Blue staining (Invitrogen). Cell numbers were expanded further in 1 L sterile shaker flasks until the required cells for the experiment were generated.

[0573] The cell suspension was centrifuged at 300 g for 5 minutes and the cell pellet resuspended in fresh growth medium and the cell suspension transferred to shaker flasks at a working volume of 40 ml in each flask with the seeding cell density adjusted according to Table-2. Each shaker flask was labelled appropriately.

TABLE 2
Experiment design set up

| | | | | | | Duration |
|---|---|---|---|---|---|---|
| | | | | | | of |
| Shaker | | | | | | Infection |
| flask | MOI | Seed Cell | | Total | Media | [DOI] |
| ID | (ppc) | Density | Volume | Cells | Change | (hrs) |
| A | 12.5 | 1.00E+06 | 40 | 4.00E+07 | Yes | 40, 48, 60, |
| | | | | | | 72, 96 |
| B | 12.5 | 1.00E+06 | 40 | 4.00E+07 | Yes | 40, 48, 60, |
| | | | | | | 72, 96 |
| C | 12.5 | 4.00E+06 | 40 | 1.60E+08 | No | 40, 48, 60, |
| | | | | | | 72, 96 |
| D | 12.5 | 4.00E+06 | 40 | 1.60E+08 | No | 40, 48, 60, |
| | | | | | | 72, 96 |
| E | 31.25 | 2.50E+06 | 40 | 1.00E+08 | No | 40, 48, 60 |
| | | | | | | 72, 96 |
| F | 31.25 | 2.50E+06 | 40 | 1.00E+08 | No | 40, 48, 60, |
| | | | | | | 72, 96 |
| G | 31.25 | 2.50E+06 | 40 | 1.00E+08 | Yes | 40, 48, 60, |
| | | | | | | 72, 96 |
| H | 50 | 1.00E+06 | 40 | 4.00E+07 | No | 40, 48, 60, |
| | | | | | | 72, 96 |
| I | 50 | 4.00E+06 | 40 | 1.60E+08 | Yes | 40, 48, 60, |
| | | | | | | 72, 96 |
| Negative | 0 | 1.00E+06 | 40 | 4.00E+07 | NA | NA |
| control | | | | | | |

Note:
1.00E+06, 1e⁶ and 1 × 10⁶; 4.00E+07, 4e⁷ and 4 × 10⁷ etc are equivalent cell number descriptors

[0574] One vial of EnAd working virus seed stock (WVSS) was removed from −70° C. storage and thawed at room temperature. Infection of the shaker flasks A to I was performed using a multiplicity of infection (MOI or ppc) according to Table-2. A negative control flask was not infected but maintained throughout the duration of infection. All shaker flasks were placed in a shaking incubator at +37° C., 5% CO₂ and 120 rpm. Media change was performed on shake flasks A, B, G and I at 24 hrs post infection by removing the supernatant after centrifugation at 300 g for 5 min and resuspending the cell pellet in 40 ml fresh growth medium in each flask.

TABLE 3
Virus calculations for infections

| | | | | | | | Volume |
|---|---|---|---|---|---|---|---|
| Shaker | | | | | AEX titer | Total vp | of Virus |
| flask ID | Cells/ml | Volume | Total cells | ppc | of virus | needed | added (μl) |
| A | 1.00E+06 | 40 | 4.00E+07 | 12.5 | 1.35E+11 | 5E+08 | 3.7 |
| B | 1.00E+06 | 40 | 4.00E+07 | 12.5 | 1.35E+11 | 5E+08 | 3.7 |
| C | 4.00E+06 | 40 | 1.60E+08 | 12.5 | 1.35E+11 | 2E+09 | 14.8 |
| D | 4.00E+06 | 40 | 1.60E+08 | 12.5 | 1.35E+11 | 2E+09 | 14.8 |
| E | 2.50E+06 | 40 | 1.00E+08 | 31.25 | 1.35E+11 | 3.125E+09 | 23.1 |
| F | 2.50E+06 | 40 | 1.00E+08 | 31.25 | 1.35E+11 | 3.125E+09 | 23.1 |
| G | 2.50E+06 | 40 | 1.00E+08 | 31.25 | 1.35E+11 | 3.125E+09 | 23.1 |
| H | 1.00E+06 | 40 | 4.00E+07 | 50 | 1.35E+11 | 2E+09 | 14.8 |
| I | 4.00E+06 | 40 | 1.60E+08 | 50 | 1.35E+11 | 8E+09 | 59.2 |

[0575] At 40, 48, 60 and 72 hours post infection, 4.1 ml samples were taken from each flask for analyses and at 96 hours post-infection all the remaining cell suspensions were harvested. 2×500 μl of the samples at each time point were used for cell count and viability analysis. The remaining 4.0 ml was used for analysis of virus distribution between the supernatant and cell pellet. This was determined by centrifugation of the infected cell culture suspension and the supernatant stored for analysis and the cell pellet lysed in fresh medium (3× freeze-thaw) which was then clarified by centrifugation prior to storing for analysis.

[0576] Total viral particle concentrations (vp) in the Crude Viral Lysate (CVL) and supernatant (SN) samples were measured by AEX-HPLC assay. During AEX-HPLC analysis, it was known that host cell proteins (HCP) elute at the beginning of the elution run and thus HCP content can also be determined by analysis of the chromatogram and the size of the HCP peak area.

[0577] Cell percentage viability and percentage trypan blue stained cells (which represent both dead cells and “leaky” cells that are not yet functionally dead but have their membrane integrity compromised such that the trypan blue dye can enter the cell) is represented in Table 4. Total number of virus particles per shaker flask culture and the percentage of viral particles in the SN and CVL for each sample time point are represented in Table 5.

[0578] Results from this DOE experiment were fitted using the ‘least square fit model’ using JMP software analysis to assess the relationship between different variables and the effects of the variable on responses in relation to viral yield (vp/cell). Three interaction relationships were observed as significant in the yield per cell model, which were 1) seeding density to DOI; 2) MOI to DOI and 3) media change to DOI.

[0579] Seeding density had the largest statistical effect on total virus production. Higher yields per cell were observed at lower cell seeding density (FIG. 3). Highest yield of 198,143 vp/cell (FIGS. 3 & 4) was observed at the lowest cell density of 1e⁶ cells/ml (infected with 12.5 ppc) compared to 4e⁶ cells/ml (infected with 12.5 ppc) where the viral yield per cell was significantly less at 5922 vp/cell (FIGS. 3 & 5). Total virus yields per flask were highest at the higher cell density and MOI conditions (flask I). Media change also had a significant statistical effect on yield (FIG. 6). Shaker flasks which had media changes post 24 hrs infection (Shaker flask A, B, G and I) had higher virus yield compared to the shaker flask which had no media change. Results are shown in FIGS. 4, 5 and 6.

[0580] At higher duration of infection (DOI) cell viability decreased and the percentage of leaky and dead cells increased. Viability and % leaky/dead data is represented in Table 4 and shown in FIGS. 7 and 8. Leaky cells are defined as cells which appear to have an intact cell membrane but the membrane is permeable to trypan blue stain. Dead cells are trypan blue stained but the cell membrane is no longer intact.

[0581] At 1e⁶ cells/ml seeding density infected with 12.5 ppc with a media change, more than 93% of virus was observed in supernatant at 96 hrs post infection (FIG. 9). At a higher cell density of 4e⁶ cells/ml, infected with the same 12.5 ppc with no media change, there was no virus observed in supernatant (FIG. 10).

TABLE 4
Viability data of shaker flasks

| time | | | | | | | |
|---|---|---|---|---|---|---|---|
| point | | Avg viable | Avg leaky | Average dead | | | |
| (h) | Flask ID | cells/ml | cells/ml | cells/ml | Total | Viability % | Leaky % |
| 40 | Neg | 9.6E+05 | 5.0E+04 | 0.0E+00 | 1.0E+06 | 95 | 5 |
| | control | | | | | | |
| | A | 4.9E+05 | 7.0E+04 | 1.7E+05 | 7.3E+05 | 68 | 10 |
| | B | 3.2E+05 | 1.9E+05 | 1.3E+05 | 6.4E+05 | 50 | 30 |
| | C | 4.3E+06 | 1.1E+06 | 8.4E+05 | 6.3E+06 | 68 | 18 |
| | D | 5.2E+06 | 4.1E+05 | 5.0E+05 | 6.1E+06 | 85 | 7 |
| | E | 5.6E+05 | 2.4E+06 | 7.4E+05 | 3.7E+06 | 15 | 64 |
| | F | 2.7E+06 | 5.8E+05 | 3.4E+05 | 3.6E+06 | 75 | 16 |
| | G | 3.7E+06 | 7.8E+05 | 4.6E+05 | 4.9E+06 | 75 | 16 |
| | H | 4.3E+05 | 2.0E+05 | 1.2E+05 | 7.5E+05 | 58 | 26 |
| | I | 2.4E+06 | 5.3E+05 | 3.0E+05 | 3.2E+06 | 74 | 16 |
| 48 | A | 3.0E+05 | 7.0E+04 | 5.0E+04 | 4.2E+05 | 71 | 17 |
| | B | 1.2E+06 | 2.7E+05 | 1.6E+05 | 1.6E+06 | 74 | 17 |
| | C | 5.2E+06 | 7.4E+05 | 3.1E+05 | 6.2E+06 | 83 | 12 |
| | D | 5.2E+06 | 8.9E+05 | 4.0E+05 | 6.5E+06 | 80 | 14 |
| | E | 2.8E+06 | 9.8E+05 | 3.6E+05 | 4.1E+06 | 68 | 24 |
| | F | 2.3E+06 | 9.1E+05 | 3.0E+05 | 3.5E+06 | 65 | 26 |
| | G | 2.9E+06 | 2.3E+06 | 4.5E+05 | 5.6E+06 | 51 | 41 |
| | H | 7.6E+05 | 6.2E+05 | 1.9E+05 | 1.6E+06 | 49 | 39 |
| | I | 1.7E+06 | 1.1E+06 | 4.3E+05 | 3.3E+06 | 53 | 34 |
| 65 | FA | 4.5E+05 | 7.7E+05 | 1.5E+05 | 1.4E+06 | 33 | 56 |
| | B | 3.4E+05 | 8.5E+05 | 9.5E+04 | 1.3E+06 | 27 | 66 |
| | C | 4.0E+06 | 1.9E+06 | 8.8E+04 | 6.0E+06 | 67 | 31 |
| | D | 4.6E+06 | 1.9E+06 | 1.0E+05 | 6.6E+06 | 69 | 29 |
| | E | 1.9E+06 | 1.6E+06 | 1.5E+05 | 3.6E+06 | 52 | 44 |
| | F | 1.9E+06 | 1.6E+06 | 7.5E+04 | 3.5E+06 | 53 | 44 |
| | G | 2.3E+06 | 3.8E+06 | 2.6E+05 | 6.3E+06 | 36 | 60 |
| | H | 3.8E+05 | 1.0E+06 | 5.5E+04 | 1.5E+06 | 26 | 70 |
| | I | 1.1E+06 | 1.8E+06 | 2.4E+05 | 3.1E+06 | 34 | 58 |
| 72 | A | 3.9E+05 | 1.1E+06 | 1.0E+05 | 1.6E+06 | 25 | 69 |
| | B | 2.8E+05 | 9.3E+05 | 1.1E+05 | 1.3E+06 | 21 | 70 |
| | C | 4.7E+06 | 2.1E+06 | 1.8E+05 | 7.0E+06 | 67 | 30 |
| | D | 4.5E+06 | 2.3E+06 | 1.9E+05 | 7.0E+06 | 64 | 33 |
| | E | 4.9E+05 | 4.0E+05 | 2.5E+04 | 9.1E+05 | 53 | 44 |
| | F | 2.0E+06 | 2.2E+06 | 3.8E+04 | 4.2E+06 | 48 | 51 |
| | G | 1.5E+06 | 3.6E+06 | 2.5E+05 | 5.4E+06 | 28 | 68 |
| | H | 3.2E+05 | 9.3E+05 | 6.5E+04 | 1.3E+06 | 24 | 71 |
| | I | 9.1E+05 | 2.5E+06 | 1.5E+05 | 3.5E+06 | 26 | 70 |
| 96 | A | 8.8E+04 | 9.1E+05 | 5.8E+04 | 1.1E+06 | 8 | 86 |
| | B | 1.2E+05 | 1.1E+06 | 4.0E+04 | 1.3E+06 | 9 | 87 |
| | C | 6.1E+05 | 5.4E+06 | 1.1E+05 | 6.1E+06 | 10 | 88 |
| | D | 6.5E+05 | 5.1E+06 | 1.0E+05 | 5.8E+06 | 11 | 87 |
| | E | 3.8E+05 | 2.6E+06 | 5.0E+04 | 3.0E+06 | 13 | 86 |
| | F | 4.6E+05 | 3.0E+06 | 6.3E+04 | 3.5E+06 | 13 | 85 |
| | G | 3.3E+05 | 4.4E+06 | 3.5E+05 | 5.1E+06 | 6 | 87 |
| | H | 1.5E+05 | 9.5E+05 | 4.0E+04 | 1.1E+06 | 13 | 83 |
| | I | 2.3E+05 | 2.4E+06 | 1.3E+05 | 2.8E+06 | 8 | 87 |

| | | | | | | |
|---|---|---|---|---|---|---|
| Neg control | 3.1E+06 | 1.7E+05 | 0.0E+00 | 3.3E+06 | 95 | 5 |

TABLE 5
AEX-HPLC assay results of ColoAd1 in Supernatant (SN) and CVL (intracellular)

| | | | Produced | Total vp | Produced | Produced | |
|---|---|---|---|---|---|---|---|
| Infection | Sample | Total vp | vp/cell | (% in | vp/cell | vp/cell | Total vp |
| time (h) | Detail | (% in SN) | (SN) | CVL) | (CVL) | (SN + CVL) | yield/flask |
| 40 | Flask A | 0 | 0 | 100 | 41222 | 41222 | 1.65 × 10¹² |
| 48 | Flask A | 20 | 15509 | 80 | 61724 | 77232 | 3.09 × 10¹² |
| 65 | Flask A | 69 | 127823 | 31 | 56114 | 183937 | 7.36 × 10¹² |
| 72 | Flask A | 98 | 163705 | 2 | 3274 | 166980 | 6.68 × 10¹² |
| 96 | Flask A | 93 | 185298 | 7 | 13893 | 199192 | 7.97 × 10¹² |
| 40 | Flask B | 0 | 0 | 100 | 36293 | 36293 | 1.45 × 10¹² |
| 48 | Flask B | 18 | 19867 | 82 | 89433 | 109301 | 4.37 × 10¹² |
| 65 | Flask B | 71 | 126002 | 29 | 52553 | 178555 | 7.14 × 10¹² |
| 72 | Flask B | 98 | 147558 | 2 | 2951 | 150510 | 6.02 × 10¹² |
| 96 | Flask B | 93 | 184024 | 7 | 13070 | 197094 | 7.88 × 10¹² |
| 40 | Flask C | 0 | 0 | 100 | 5843 | 5843 | 9.35 × 10¹¹ |
| 48 | Flask C | 0 | 0 | 100 | 5706 | 5706 | 9.13 × 10¹¹ |
| 65 | Flask C | 0 | 0 | 100 | 3767 | 3767 | 6.03 × 10¹¹ |
| 72 | Flask C | 0 | 0 | 100 | 3631 | 3631 | 5.81 × 10¹¹ |
| 96 | Flask C | 0 | 0 | 0 | 0 | 0 | 0 |
| 40 | Flask D | 0 | 0 | 100 | 6001 | 6001 | 9.60 × 10¹¹ |
| 48 | Flask D | 0 | 0 | 100 | 6772 | 6772 | 1.08 × 10¹² |
| 65 | Flask D | 0 | 0 | 100 | 3488 | 3488 | 5.58 × 10¹¹ |
| 72 | Flask D | 0 | 0 | 100 | 4178 | 4178 | 6.68 × 10¹¹ |
| 96 | Flask D | 0 | 0 | 0 | 0 | 0 | 0 |
| 40 | Flask E | 0 | 0 | 100 | 20149 | 20149 | 2.01 × 10¹² |
| 48 | Flask E | 30 | 7142 | 70 | 16276 | 23418 | 2.34 × 10¹² |
| 65 | Flask E | 56 | 11305 | 44 | 8813 | 20117 | 2.01 × 10¹² |
| 72 | Flask E | 64 | 14559 | 36 | 8302 | 22861 | 2.29 × 10¹² |
| 96 | Flask E | 85 | 17386 | 15 | 3172 | 20558 | 2.06 × 10¹² |
| 40 | Flask F | 0 | 0 | 100 | 25088 | 25088 | 2.51 × 10¹² |
| 48 | Flask F | 26 | 7574 | 74 | 21086 | 28660 | 2.87 × 10¹² |
| 65 | Flask F | 57 | 12324 | 43 | 9413 | 21737 | 2.17 × 10¹² |
| 72 | Flask F | 69 | 18240 | 31 | 8220 | 26460 | 2.65 × 10¹² |
| 96 | Flask F | 88 | 20295 | 12 | 2725 | 23020 | 2.30 × 10¹² |
| 40 | Flask G | 11 | 7003 | 89 | 57008 | 64010 | 6.40 × 10¹² |
| 48 | Flask G | 38 | 30548 | 62 | 48833 | 79382 | 7.94 × 10¹² |
| 65 | Flask G | 59 | 46073 | 41 | 31699 | 77772 | 7.78 × 10¹² |
| 72 | Flask G | 66 | 57663 | 34 | 29199 | 86862 | 8.69 × 10¹² |
| 96 | Flask G | 81 | 65738 | 19 | 15773 | 81510 | 8.15 × 10¹² |
| 40 | Flask H | 28 | 19075 | 72 | 49192 | 68267 | 2.73 × 10¹² |
| 48 | Flask H | 53 | 55309 | 47 | 48091 | 103400 | 4.14 × 10¹² |
| 65 | Flask H | 79 | 98126 | 21 | 25714 | 123841 | 4.95 × 10¹² |
| 72 | Flask H | 81 | 107729 | 19 | 25036 | 132765 | 5.31 × 10¹² |
| 96 | Flask H | 92 | 105893 | 8 | 8775 | 114668 | 4.59 × 10¹² |
| 40 | Flask I | 19 | 6169 | 81 | 26235 | 32404 | 5.18 × 10¹² |
| 48 | Flask I | 39 | 20457 | 61 | 31430 | 51887 | 8.30 × 10¹² |
| 65 | Flask I | 71 | 38093 | 29 | 15738 | 53831 | 8.61 × 10¹² |
| 72 | Flask I | 72 | 44409 | 28 | 17336 | 61746 | 9.88 × 10¹² |
| 96 | Flask I | 81 | 47634 | 19 | 11180 | 58814 | 9.41 × 10¹² |

### Example 12

[0582] Key DOE parameters indicated from the experiment described in Example 11 in shake flasks were assessed in a 5 L bioreactor. HEK293 cell expansion and bioreactor preparation was performed as described in Example 9. Cell counting was performed using automatic cell counter and trypan blue staining. Once viable cells totaling 7.5e⁸ cells were attained in shake flasks, the cells were used to inoculate the 5 L bioreactor. The bioreactor was infected with EnAd at an MOI of 12.5 ppc when the target cell density of 1e⁶ cell/mL was achieved.

[0583] At 24, 40, 48, 65 and 70 hrs post infection samples (20 ml) were taken for cell count, viability and total virus concentration. The supernatant was separated from the cells by centrifugation and stored at −80° C. until viral particle concentrations analysis by AEX-HPLC was performed. The cell pellet samples were prepared as outlined in Example 11 and stored at −80° C. until HPLC analysis. The results are shown in Tables 6.

[0584] Under these conditions, the majority of the virus was present in the CVL for all time points (FIG. 11) with no significant virus present in the supernatant until 71 h post infection. At 71 hrs post-infection, 96% of EnAd virus was observed in the cell pellet (Table 6 and FIG. 11) with only 4% present in supernatant (Table 6). A total of 428,868 virus particles were extracted from the cells by chemical lysis and cell debris removed by clarification (refer to post lysis numbers in table 6).

[0585] Cell viability at 71 hour post infection with 12.5 ppc was 58% compared to 85% at TO (FIG. 13). At 71 hour post infection with 50 ppc (see Example 13), the cell viability was typically below 30%.

TABLE 6
AEX-HPLC assay results of EnAd

| Infec- | | | | | | | |
|---|---|---|---|---|---|---|---|
| tion | | | | | | | Total vp |
| time | total vp | % | total vp | % | vp/cell | vp/cell | yield from |
| point | SN | SN | CVL | CVL | (SN) | (CVL) | bioreactor |
| 24 | 0.00E+00 | 0 | 2.37E+13 | 100 | 0 | 7914 | 2.40E+13 |
| 40 | 0.00E+00 | 0 | 4.74E+13 | 100 | 0 | 15796 | 4.70E+13 |
| 48 | 0.00E+00 | 0 | 6.18E+13 | 100 | 0 | 20605 | 6.20E+13 |
| 65 | 0.00E+00 | 0 | 3.79E+14 | 100 | 0 | 126367 | 3.80E+14 |
| 71 | 2.81E+13 | 4 | 6.06E+14 | 96 | 9383 | 202069 | 6.30E+14 |
| Post | 1.28E+15 | 99 | 8.67E+12 | 1 | 425979 | 2889 | 1.30E+15 |
| lysis | | | | | | | |

### Example 13

[0586] An experimental protocol as described in Example 12 was employed with a target cell density at infection of 1.9e⁶ cells/ml and the culture was infected with EnAd at an MOI of 50 ppc. Samples were taken at 24, 48, 60 and 70 hrs post-infection. The viral particle concentrations of the samples were analysed with AEX-HPLC and the results are shown in Tables 7.

[0587] At 71 hrs post-infection, 59% (89, 485 vp) of EnAd virus was observed in the supernatant (Table 8) with 41% (63, 081 vp) present in the cell viral lysate (Table 7 and FIG. 12). A total of 213, 981 virus particles were extracted from the cells by chemical lysis and cell debris removed by clarification (Refer to post lysis numbers in Table 7).

[0588] In this experiment, the bioreactor culture parameters of 1.9e⁶ cell/mL infected with 50 ppc produced half the yield (213981 vp/cell) compared to the parameters outlined in Example 12 where 428,868 vp/cell were produced at 1e6 cell/mL infected with 12.5 ppc.

[0589] Cell viability at 71 hour post infection with 50 ppc was 26% compared to 96% at TO (FIG. 14). Cell viability at 71 hour post infection with 12.5 ppc (in Example 12) was 58% compared to 85% at TO (FIG. 13). The low MOI (12.5 ppc) at infection may account for the higher (post infection) cell viability (58%) at 71 h which potentially contributed to the 2 fold higher viral production post lysis in Example 12 compared to this study (FIG. 15).

TABLE 7
AEX-HPLC assay results of EnAd

| Infection | | | | | | | Total vp |
|---|---|---|---|---|---|---|---|
| time | total vp | | total vp | | vp/cell | vp/cell | yield form |
| point | SN | % SN | CVL | % CVL | (SN) | (CVL) | bioreactor |
| 24 | 0.00E+00 | 0 | 1.57E+14 | 100 | 0 | 27550 | 1.60E+14 |
| 48 | 1.95E+14 | 23 | 6.49E+14 | 77 | 34141 | 113941 | 8.40E+14 |
| 60 | 3.59E+14 | 43 | 4.80E+14 | 57 | 62966 | 84245 | 8.40E+14 |
| 71 | 5.10E+14 | 59 | 3.60E+14 | 41 | 89485 | 63081 | 8.70E+14 |
| Post lysis | 1.11E+15 | 100 | 0.00E+00 | 0 | 213981 | 0 | 1.20E+15 |

### Example 14

[0590] An experimental protocol was employed as described in Example 1 but with a shaker flask working volume of 25 ml, cell density of 2.2×10⁶ viable cells/mL and 50 ppc infection. To explore principles of a continuous manufacturing approach, at various time points 20 mL of the 25 mL cell suspension (80%) was removed and replaced with 20 mL non-infected cells at the same cell density as at the start (2.2×10⁶ viable cells/mL) in fresh medium. The experiment was continued for 7 days and on each day (Day 1, Day 2, Day 3, Day 4, Day 5, Day 6 and Day 7) the 20 mL post infection samples were taken for cell count, viability and total virus concentrations in supernatant and CVL. Post infection cell counting was performed using Hemocytometer and Trypan Blue stain (Invitrogen). The supernatant was separated from the cells by centrifugation and stored at −80° C. for viral particle concentration analysis by AEX-HPLC. The cell pellet samples were prepared as outlined in Example 11 and stored at −80° C. until HPLC analysis. The viability results are shown in Table 8 and the HPLC results for supernatant and CVL are shown in Table 9.

[0591] Control shaker flasks as the experimental control for this experiment were set up with a working volume of 25 ml, cell density of 2.2×10⁶ viable cells/mL and infected with 50 ppc. No cell suspension removal or addition of fresh cells and medium were undertaken with these control flasks post infection. These controls were terminated at Day 3 post infection. Cell count and viability were assessed daily and day 3 post-infection samples were taken for cell count, viability and total virus concentrations. Samples were processed as described in Example 11 for supernatant and CVL analysis by HPLC. The results are shown in Table 9.

[0592] The cell viability on Day 1 was 94% which decreased overtime with the lowest viability at 5% on Day 7. The percentage of leaky cells increased over time with the highest amount present on Day 7(86%) (Refer to Table 8 and FIG. 16). The control cell viability at Day 1 was also 94% which decreased with the lowest viability on Day 3 (34%). The percentage leaky cells increased over time with the highest on Day 3 (64%) (Table 8 and FIG. 18).

TABLE 8
Viability data in shaker flasks

| | Avg | Avg | Avg | | | | | | |
|---|---|---|---|---|---|---|---|---|---|
| | viable | leaky | dead | Avg | Avg | Avg | | | |
| Timepoint | cells 8 | cells 8 | cells 8 | viable | (leaky) | dead | | | |
| (h) | squares | squares | squares | cells | cells | cells | Total | Viability % | Leaky % |
| Day 1 | 55 | 0 | 3.5 | 2.20E+06 | 0.00E+00 | 0.00E+00 | 2.00E+06 | 94 | 6 |
| Day 2 | 47.75 | 10.5 | 0 | 1.91E+06 | 4.20E+05 | 0.00E+00 | 2.33E+06 | 72 | 18 |
| Day 3 | 32.5 | 22.5 | 2.25 | 6.50E+05 | 4.95E+05 | 4.50E+04 | 1.19E+06 | 55 | 42 |
| Day 4 | 12 | 85.5 | 7.25 | 2.40E+05 | 1.86E+06 | 1.45E+05 | 2.24E+06 | 11 | 83 |
| Day 5 | 7 | 75.25 | 6.5 | 1.40E+05 | 1.64E+06 | 1.30E+05 | 1.91E+06 | 7 | 86 |
| Day 6 | 21 | 69.75 | 8 | 4.20E+05 | 1.56E+06 | 1.60E+05 | 2.14E+06 | 20 | 73 |
| Day 7 | 5.75 | 83.25 | 8.75 | 1.15E+05 | 1.84E+06 | 1.75E+05 | 2.13E+06 | 5 | 86 |
| Control | 55 | 0 | 3.5 | 2.20E+06 | 0.00E+00 | 0.00E+00 | 2.00E+06 | 94 | 6 |
| Day 1 | | | | | | | | | |
| Control | 20 | 6.5 | 0 | 8.00E+05 | 2.60E+05 | 0.00E+00 | 1.06E+06 | 75 | 25 |
| Day 2 | | | | | | | | | |
| Control | 64.75 | 120 | 4 | 1.30E+06 | 2.40E+06 | 8.00E+04 | 3.78E+06 | 34 | 64 |
| Day 3 | | | | | | | | | |

[0593] The percentage of virus in the supernatant varied from day 3 to day 7 with maximum on day 5 and 6 (46 & 47%, respectively). By day 7 only 17% was present in the supernatant (Table 9 and FIG. 17). The control at day 3 had 74% of the virus present in the supernatant (FIG. 19). For the control CVL, at day 3 only 26% virus remained in the cell, where as in the continuous manufacturing test flasks 53% remained in the cell from day 1 to 7 with 83% present in the cell at day 7 (Table 9, FIG. 19) For this study, the total cumulative viral particles generated by the daily addition of fresh non-infected cell to the infected cell cultures over 7 days was 1.36e¹³ vp which was 7-fold higher than the amount generated in the control flasks (2.0e¹² vp). The total amount in the supernatant over 7 days was 3.7e¹² vp which represented 27% of the total vp (1.36e¹³ vp), with 73% present in the CVL during the 7 days. In comparison, the viral distribution of the control was 74% (1.5e¹² vp) present in the supernatant with 26% (5.2e¹¹ vp) present in the CVL (Table 9 and 10, FIG. 20).

TABLE 9
AEX-HPLC assay results of EnAd

| Days | | | | | | | | |
|---|---|---|---|---|---|---|---|---|
| post | Total vp | | Total vp | | vp/cell | vp/cell | vp/cell | |
| infection | SN | % SN | CVL | % CVL | (SN) | (CVL) | (SN + CVL) | Total vp |
| Day1 | 0.0E+00 | 0% | 4.4E+11 | 100% | 0 | 10104 | 10104 | 4.45E+11 |
| Day2 | 3.3E+11 | 23% | 1.1E+12 | 77% | 7560 | 24973 | 32533 | 1.43E+12 |
| Day3 | 6.8E+11 | 26% | 1.9E+12 | 74% | 15367 | 43736 | 59103 | 2.60E+12 |
| Day4 | 7.5E+11 | 24% | 2.4E+12 | 76% | 17055 | 54515 | 71570 | 3.15E+12 |
| Day5 | 9.6E+11 | 46% | 1.1E+12 | 54% | 21859 | 25821 | 47680 | 2.10E+12 |
| Day6 | 5.3E+11 | 47% | 6.0E+11 | 53% | 12002 | 13677 | 25679 | 1.13E+12 |
| Day7 | 4.6E+11 | 17% | 2.3E+12 | 83% | 10497 | 52621 | 63118 | 2.78E+12 |
| Control | 1.5E+12 | 74% | 5.2E+11 | 26% | 27435 | 9522 | 36957 | 2.0E+12 |

TABLE 10
Total virus particles

| Experiment | Total VP SN | Total VP CVL | Total VP |
|---|---|---|---|
| Cumulative Total | 3.71E+12 (27%) | 9.84E+12 (73%) | 1.36E+13 |
| VP (Day 1-7) | | | |
| Control | 1.5E+12 (74%) | 5.2E+11 (26%) | 2.0E+12 |

### Example 15

[0594] An experimental protocol was employed as described in Example 14 but with a shaker flask working volume of 50 ml, cell density of 1.0×10⁶ viable cells/mL and 12.5 ppc infection. At various time points 40 mL of the 50 mL suspension (80%) was removed and replaced with 40 mL uninfected cells at 1.0×10⁶ viable cells/mL in fresh medium. The experiment was continued for 5 days and on each day (Day 1, Day 2, Day 3, Day 4 and Day 5) post infection samples were taken for cell count, viability and total virus concentration. Post infection cell counting was performed using Hemocytometer and Trypan Blue stain (Invitrogen). The supernatant was separated from the cells by centrifugation and stored at −80° C. until viral particle concentrations analysis by AEX-HPLC was performed. The cell pellet samples was prepared as outlined in Example 11 and stored at −80° C. until HPLC analysis. The viability results are shown in Tables 11. The HPLC results for supernatant and CVL are in Table 12.

[0595] The cell viability on Day 1 was 78% which decreased overtime with the lowest viability at Day 7(16%). The percentage leaky cells increased over time with highest amount present on Day 3 (82%) (Table 11 and FIG. 21). The control cell viability at Day 1 was 73% which decreased with the lowest viability recorded on Day 3(23%). The percentage leaky cells increased over time and highest on Day 3(70%) (FIG. 23).

TABLE 11
Viability data of shaker flasks

| | Avg | Avg | Avg | | | | | | |
|---|---|---|---|---|---|---|---|---|---|
| | viable | leaky | dead | Avg | | | | | |
| Timepoint | cells 8 | cells 8 | cells 8 | viable | Avg leaky | Avg dead | | | |
| (h) | squares | squares | squares | cells | cells | cells | Total | Viability % | Leaky % |
| Day 1 | 50.3 | 12.8 | 1.3 | 1.01E+06 | 2.55E+05 | 2.50E+04 | 1.29E+06 | 10.5 | 20 |
| Day 2 | 53.3 | 22.5 | 2.3 | 1.07E+06 | 4.50E+05 | 4.50E+04 | 1.56E+06 | 56 | 41 |
| Day 3 | 3.8 | 27.5 | 6.3 | 7.50E+04 | 5.50E+05 | 1.25E+05 | 7.50E+05 | 30 | 82 |
| Day 4 | 6.8 | 28.5 | 6.0 | 1.35E+05 | 5.70E+05 | 1.20E+05 | 8.25E+05 | 24 | 65 |
| Day 5 | 8.0 | 34.3 | 2.3 | 1.60E+05 | 6.85E+05 | 4.50E+04 | 8.90E+05 | 17 | 76 |
| Control | 18 | 4 | 3 | 7.35E+05 | 1.68E+05 | 1.03E+05 | 1.01E+06 | 73 | 17 |
| Day-1 | | | | | | | | | |
| Control | 20 | 40 | 6 | 3.93E+05 | 8.06E+05 | 1.20E+05 | 1.32E+06 | 30 | 61 |
| Day-2 | | | | | | | | | |
| Control | 17 | 50 | 5 | 3.34E+05 | 1.00E+06 | 1.06E+05 | 1.44E+06 | 23 | 70 |
| Day-3 | | | | | | | | | |

[0596] The percentage of virus in the supernatant varied from day 1 to day 5 with maximum on day 4 (28%, respectively). By day 5 only 18% was present in the supernatant (Table 12 and FIG. 22). The control (flasks which did not have removal and replacement of cells and medium) at day 3 had 81% of the virus present in the supernatant and 19% in CVL.

[0597] For this control CVL, at day 3 only 19% virus remained in the cell, where as in the flasks having daily cell and media replacements ≧72% remained cell associated from day 1 to 5 with 82% present in the cell pellets at day 5 (Table 12).

[0598] In this study, the total viral particles generated by the addition of fresh non-infected cells to infected cells over 5 days was 2.33e¹³ vp which was 3-fold higher than the amount generated in the control (7.6e¹²). The total amount in the supernatant over 5 days was 4.4e¹² vp which represented 19% of the total vp (2.33e¹³), with 81% present in the CVL during the 5 days. In comparison, the viral distribution of the control cultures was 81% (6.10e¹²) present in the supernatant with 19% (1.48e¹²) present in the CVL (Table 12 and 13, FIG. 25).

TABLE 12
AEX-HPLC assay results of EnAd

| | Total VP | | Total VP | | vp/cell | vp/cell | vp/cell | |
|---|---|---|---|---|---|---|---|---|
| Sample ID | SN | % SN | CVL | % CVL | (SN) | (CVL) | (SN + CVL) | Total VP |
| Day 1 | 0.0E+00 | 0% | 6.1E+11 | 100% | 0 | 15357 | 15357 | 6.1E+11 |
| Day 2 | 0.0E+00 | 0% | 2.6E+12 | 100% | 0 | 63820 | 63820 | 2.6E+12 |
| Day 3 | 1.2E+12 | 19% | 5.1E+12 | 81% | 29834 | 128393 | 158227 | 6.3E+12 |
| Day 4 | 2.0E+12 | 28% | 5.2E+12 | 72% | 50298 | 129956 | 180254 | 7.2E+12 |
| Day 5 | 1.2E+12 | 18% | 5.4E+12 | 82% | 30008 | 134004 | 164012 | 6.6E+12 |
| control | 6.1E+12 | 81% | 1.48E+12 | 19% | 153565 | 36964 | 190529 | 7.6E+12 |

TABLE 13
Total virus particles

| Experiment | Total VP SN | Total VP CVL | Total VP |
|---|---|---|---|
| Cumulative Total | 4.40E+12 | 1.89E+13 | 2.33E+13 |
| VP (Day 1-5) | | | |
| control | 6.10E+12 | 1.48E+12 | 7.60E+12 |

### Example 16

[0599] An experimental protocol was employed as described in Example 15 but at various time points 47.5 mL of the 50 mL suspension (95%) was removed and replaced with 47.5 mL uninfected cells in fresh medium at the same cell density of 1.0×10⁶ viable cells/mL. This study was run in parallel with that in Example 15 and used the same control flasks. The viability results are shown in Tables 14. The HPLC results for supernatant and CVL are shown in Table 15.

[0600] The cell viability on Day 1 was 78% which decreased overtime with the lowest viability at Day 5 (16%). The percentage leaky cells increased over time with highest amount present on Day 5 (77%) (Table 14 and FIG. 26). The control cell viability at Day 1 was 73% which decreased with the lowest viability recorded on Day 3 (23%). The percentage leaky cells increased over time and highest on Day 3 (70%) (FIG. 23).

TABLE 14
Viability data of shaker flasks

| | Avg viable | Avg leaky | Avg dead | | | |
|---|---|---|---|---|---|---|
| Timepoint (h) | cells | cells | cells | Total | Viability % | Leaky % |
| Day 1 | 1.01E+06 | 2.55E+05 | 2.50E+04 | 1.29E+06 | 78 | 20 |
| Day 2 | 1.07E+06 | 4.50E+05 | 4.50E+04 | 1.56E+06 | 68 | 29 |
| Day 3 | 7.50E+04 | 5.50E+05 | 1.25E+05 | 7.50E+05 | 30 | 73 |
| Day 4 | 1.35E+05 | 5.70E+05 | 1.20E+05 | 8.25E+05 | 16 | 69 |
| Day 5 | 1.60E+05 | 6.85E+05 | 4.50E+04 | 8.90E+05 | 18 | 77 |
| Control Day-1 | 7.35E+05 | 1.68E+05 | 1.03E+05 | 1.01E+06 | 73 | 17 |
| Control Day-2 | 3.93E+05 | 8.06E+05 | 1.20E+05 | 1.32E+06 | 30 | 61 |
| Control Day-3 | 3.34E+05 | 1.00E+06 | 1.06E+05 | 1.44E+06 | 23 | 70 |

[0601] From Day 1 to 5 no virus present in the supernatant, all viruses remained in CVL (Table 15 and FIG. 27).

[0602] For this experiment, the total viral particles generated by the daily removal of suspension and addition of fresh non-infected cell to infected cells over 5 days was 1.96e¹³ vp which was 3 fold higher than the amount generated in the control (7.6e¹²). The total amount of virus in the CVL over 5 days was 1.96e¹³ vp which represented 100% of the total vp (1.96e¹³). In comparison, the viral distribution of the control was 81% (6.10e¹²) present in the supernatant with 19% (1.48e¹²) present in the CVL (Table 16 and FIG. 28).

TABLE 15
AEX-HPLC assay results of ColoAd1

| | Total VP | | Total VP | | vp/cell | vp/cell | vp/cell | |
|---|---|---|---|---|---|---|---|---|
| Sample ID | SN | % SN | CVL | % CVL | (SN) | (CVL) | (SN + CVL) | Total VP |
| Day 1 | 0.00E+00 | 0% | 9.7E+11 | 100% | 0 | 20513 | 20513 | 9.7E+11 |
| Day 2 | 0.00E+00 | 0% | 1.5E+12 | 100% | 0 | 31209 | 31209 | 1.5E+12 |
| Day 3 | 0.00E+00 | 0% | 5.0E+12 | 100% | 0 | 105575 | 105575 | 5.0E+12 |
| Day 4 | 0.00E+00 | 0% | 5.8E+12 | 100% | 0 | 122263 | 122263 | 5.8E+12 |
| Day 5 | 0.00E+00 | 0% | 6.3E+12 | 100% | 0 | 133257 | 133257 | 6.3E+12 |
| control | 6.1E+12 | 81% | 1.48E+12 | 19% | 153565 | 36964 | 190529 | 7.6E+12 |

TABLE 16
Total virus particles

| Experiment | Total VP SN | Total VP CVL | Total VP |
|---|---|---|---|
| Cumulative Total | 0.00E+00 | 1.96E+13 | 1.96E+13 |
| VP (Day 1-5) | | | |
| control | 6.10E+12 | 1.48E+12 | 7.60E+12 |

The application's sequence listing, which the Patent Office published only in electronic form, follows.

SEQUENCE LISTING (73 sequences)

SEQ ID NO: 1 - DNA, 35373 bp, Artificial Sequence
  NG-77 virus genome sequence
tctatctatataatataccttatagatggaatggtgccaatatgtaaatgaggtgattttaaaaagtgtggatcgtgtggtgattggctgtggggttaacggctaaaaggggcggtgcgaccgtgggaaaatgacgttttgtgggggtggagtttttttgcaagttgtcgcgggaaatgtgacgcataaaaaggcttttttctcacggaactacttagttttcccacggtatttaacaggaaatgaggtagttttgaccggatgcaagtgaaaattgttgattttcgcgcgaaaactgaatgaggaagtgtttttctgaataatgtggtatttatggcagggtggagtatttgttcagggccaggtagactttgacccattacgtggaggtttcgattaccgtgttttttacctgaatttccgcgtaccgtgtcaaagtcttctgtttttacgtaggtgtcagctgatcgctagggtatttatacctcagggtttgtgtcaagaggccactcttgagtgccagcgagaagagttttctcctctgcgccggcagtttaataataaaaaaatgagagatttgcgatttctgcctcaggaaataatctctgctgagactggaaatgaaatattggagcttgtggtgcacgccctgatgggagacgatccggagccacctgtgcagctttttgagcctcctacgcttcaggaactgtatgatttagaggtagagggatcggaggattctaatgaggaagctgtaaatggcttttttaccgattctatgcttttagctgctaatgaagggttagaattagatccgcctttggacacttttgatactccaggggtaattgtggaaagcggtacaggtgtaagaaaattacctgatttgagttccgtggactgtgatttgcactgctatgaagacgggtttcctccgagtgatgaggaggaccatgaaaaggagcagtccatgcagactgcagcgggtgagggagtgaaggctgccaatgttggttttcagttggattgcccggagcttcctggacatggctgtaagtcttgtgaatttcacaggaaaaatactggagtaaaggaactgttatgttcgctttgttatatgagaacgcactgccactttatttacagtaagtgtgtttaagttaaaatttaaaggaatatgctgtttttcacatgtatattgagtgtgagttttgtgcttcttattataggtcctgtgtctgatgctgatgaatcaccatctcctgattctactacctcacctcctgagattcaagcacctgttcctgtggacgtgcgcaagcccattcctgtgaagcttaagcctgggaaacgtccagcagtggaaaaacttgaggacttgttacagggtggggacggacctttggacttgagtacacggaaacgtccaagacaataagtgttccatatccgtgtttacttaaggtgacgtcaatatttgtgtgacagtgcaatgtaataaaaatatgttaactgttcactggtttttattgctttttgggcggggactcaggtatataagtagaagcagacctgtgtggttagctcataggagctggctttcatccatggaggtttgggccattttggaagaccttaggaagactaggcaactgttagagaacgcttcggacggagtctccggtttttggagattctggttcgctagtgaattagctagggtagtttttaggataaaacaggactataaacaagaatttgaaaagttgttggtagattgcccaggactttttgaagctcttaatttgggccatcaggttcactttaaagaaaaagttttatcagttttagacttttcaaccccaggtagaactgctgctgctgtggcttttcttacttttatattagataaatggatcccgcagactcatttcagcaggggatacgttttggatttcatagccacagcattgtggagaacatggaaggttcgcaagatgaggacaatcttaggttactggccagtgcagcctttgggtgtagcgggaatcctgaggcatccaccggtcatgccagcggttctggaggaggaacagcaagaggacaacccgagagccggcctggaccctccagtggaggaggcggagtagctgacttgtctcctgaactgcaacgggtgcttactggatctacgtccactggacgggataggggcgttaagagggagagggcatctagtggtactgatgctagatctgagttggctttaagtttaatgagtcgcagacgtcctgaaaccatttggtggcatgaggttcagaaagagggaagggatgaagtttctgtattgcaggagaaatattcactggaacaggtgaaaacatgttggttggagcctgaggatgattgggaggtggccattaaaaattatgccaagatagctttgaggcctgataaacagtataagattactagacggattaatatccggaatgcttgttacatatctggaaatggggctgaggtggtaatagatactcaagacaaggcagttattagatgctgcatgatggatatgtggcctggggtagtcggtatggaagcagtaacttttgtaaatgttaagtttaggggagatggttataatggaatagtgtttatggccaataccaaacttatattgcatggttgtagcttttttggtttcaacaatacctgtgtagatgcctggggacaggttagtgtacggggatgtagtttctatgcgtgttggattgccacagctggcagaaccaagagtcaattgtctctgaagaaatgcatatttcaaagatgtaacctgggcattctgaatgaaggcgaagcaagggtccgccactgcgcttctacagatactggatgttttattttgattaagggaaatgccagcgtaaagcataacatgatttgcggtgcttccgatgagaggccttatcaaatgctcacttgtgctggtgggcattgtaatatgctggctactgtgcatattgtttcccatcaacgcaaaaaatggcctgtttttgatcacaatgtgatgacgaagtgtaccatgcatgcaggtgggcgtagaggaatgtttatgccttaccagtgtaacatgaatcatgtgaaagtgttgttggaaccagatgccttttccagaatgagcctaacaggaatttttgacatgaacatgcaaatctggaagatcctgaggtatgatgatacgagatcgagggtacgcgcatgcgaatgcggaggcaagcatgccaggttccagccggtgtgtgtagatgtgactgaagatctcagaccggatcatttggttattgcccgcactggagcagagttcggatccagtggagaagaaactgactaaggtgagtattgggaaaactttggggtgggattttcagatggacagattgagtaaaaatttgttttttctgtcttgcagctgtcatgagtggaaacgcttcttttaaggggggagtcttcagcccttatctgacagggcgtctcccatcctgggcaggagttcgtcagaatgttatgggatctactgtggatggaagacccgtccaacccgccaattcttcaacgctgacctatgctactttaagttcttcacctttggacgcagctgcagctgccgccgccgcttctgttgccgctaacactgtgcttggaatgggttactatggaagcatcatggctaattccacttcctctaataacccttctaccctgactcaggacaagttacttgtccttttggcccagctggaggctttgacccaacgtctgggtgaactttctcagcaggtggtcgagttgcgagtacaaactgagtctgctgtcggcacggcaaagtctaaataaaaaaatcccagaatcaatgaataaataaacaagcttgttgttgatttaaaatcaagtgtttttatttcatttttcgcgcacggtatgccctagaccaccgatctctatcattgagaactcggtggattttttccaggatcctatagaggtgggattgaatgtttagatacatgggcattaggccgtctttggggtggagatagctccattgaagggattcatgctccggggtagtgttgtaaatcacccagtcataacaaggtcgcagtgcatggtgttgcacaatatcttttagaagtaggctgattgccacagataagcccttggtgtaggtgtttacaaaccggttgagctgggatgggtgcattcggggtgaaattatgtgcattttggattggatttttaagttggcaatattgccgccaagatcccgtcttgggttcatgttatgaaggaccaccaagacggtgtatccggtacatttaggaaatttatcgtgcagcttggatggaaaagcgtggaaaaatttggagacacccttgtgtcctccaagattttccatgcactcatccatgataatagcaatggggccgtgggcagcggcgcgggcaaacacgttccgtgggtctgacacatcatagttatgttcctgagttaaatcatcataagccattttaatgaatttggggcggagagtaccagattggggtatgaatgttccttcgggccccggagcatagttcccctcacagatttgcatttcccaagctttcagttccgagggtggaatcatgtccacctggggggctatgaaaaacaccgtttctggggcgggggtgattaattgtgatgatagcaaatttctgagcaattgagatttgccacatccggtggggccataaatgattccgattacgggttgcaggtggtagtttagggaacggcaactgccgtcttctcgaagcaagggggccacctcgttcatcatttcccttacatgcatattttcccgcaccaaatccattaggaggcgctctcctcctagtgatagaagttcttgtagtgaggaaaagtttttcagcggtttcagaccgtcagccatgggcattttggagagagtttgctgcaaaagttctagtctgttccacagttcagtgatgtgttctatggcatctcgatccagcagacctcctcgtttcgcgggtttggacggctcctggaatagggtatgagacgatgggcgtccagcgctgccagggttcggtccttccagggtctcagtgttcgagtcagggttgtttccgtcacagtgaaggggtgtgcgcctgcttgggcgcttgccagggtgcgcttcagactcatcctgctggtcgaaaacttctgtcgcttggcgccctgtatgtcggccaagtagcagtttaccatgagttcgtagttgagcgcctcggctgcgtggcctttggcgcggagcttacctttggaagttttcttgcataccgggcagtataggcatttcagcgcatacaacttgggcgcaaggaaaacggattctggggagtatgcatctgcgccgcaggaggcgcaaacagtttcacattccaccagccaggttaaatccggttcattggggtcaaaaacaagttttccgccatattttttgatgcgtttcttacctttggtctccatgagttcgtgtcctcgttgagtgacaaacaggctgtccgtgtccccgtagactgattttacaggcctcttctccagtggagtgcctcggtcttcttcgtacaggaactctgaccactctgatacaaaggcgcgcgtccaggccagcacaaaggaggctatgtgggaggggtagcgatcgttgtcaaccagggggtccaccttttccaaagtatgcaaacacatgtcaccctcttcaacatccaggaatgtgattggcttgtaggtgtatttcacgtgacctggggtccccgctgggggggtataaaagggggcggttctttgctcttcctcactgtcttccggatcgctgtccaggaacgtcagctgttggggtaggtattccctctcgaaggcgggcatgacctctgcactcaggttgtcagtttctaagaacgaggaggatttgatattgacagtgccggttgagatgcctttcatgaggttttcgtccatctggtcagaaaacacaatttttttattgtcaagtttggtggcaaatgatccatacagggcgttggataaaagtttggcaatggatcgcatggtttggttcttttccttgtccgcgcgctctttggcggcgatgttgagttggacatactcgcgtgccaggcacttccattcggggaagatagttgttaattcatctggcacgattctcacttgccaccctcgattatgcaaggtaattaaatccacactggtggccacctcgcctcgaaggggttcattggtccaacagagcctacctcctttcctagaacagaaagggggaagtgggtctagcataagttcatcgggagggtctgcatccatggtaaagattcccggaagtaaatccttatcaaaatagctgatgggagtggggtcatctaaggccatttgccattctcgagctgccagtgcgcgctcatatgggttaaggggactgccccatggcatgggatgggtgagtgcagaggcatacatgccacagatgtcatagacgtagatgggatcctcaaagatgcctatgtaggttggatagcatcgcccccctctgatacttgctcgcacatagtcatatagttcatgtgatggcgctagcagccccggacccaagttggtgcgattgggtttttctgttctgtagacgatctggcgaaagatggcgtgagaattggaagagatggtgggtctttgaaaaatgttgaaatgggcatgaggtagacctacagagtctctgacaaagtgggcataagattcttgaagcttggttaccagttcggcggtgacaagtacgtctagggcgcagtagtcaagtgtttcttgaatgatgtcataacctggttggtttttcttttcccacagttcgcggttgagaaggtattcttcgcgatccttccagtactcttctagcggaaacccgtctttgtctgcacggtaagatcctagcatgtagaactgattaactgccttgtaagggcagcagcccttctctacgggtagagagtatgcttgagcagcttttcgtagcgaagcgtgagtaagggcaaaggtgtctctgaccatgactttgaggaattggtatttgaagtcgatgtcgtcacaggctccctgttcccagagttggaagtctacccgtttcttgtaggcggggttgggcaaagcgaaagtaacatcattgaagagaatcttgccggccctgggcatgaaattgcgagtgatgcgaaaaggctgtggtacttccgctcggttattgataacctgggcagctaggacgatctcgtcgaaaccgttgatgttgtgtcctacgatgtataattctatgaaacgcggcgtgcctctgacgtgaggtagcttactgagctcatcaaaggttaggtctgtggggtcagataaggcgtagtgttcgagagcccattcgtgcaggtgaggattcgctttaaggaaggaggaccagaggtccactgccagtgctgtttgtaactggtcccggtactgacgaaaatgccgtccgactgccattttttctggggtgacgcaatagaaggtttgggggtcctgccgccagcgatcccacttgagttttatggcgaggtcataggcgatgttgacgagccgctggtctccagagagtttcatgaccagcatgaaggggattagctgcttgccaaaggaccccatccaggtgtaggtttccacatcgtaggtgagaaagagcctttctgtgcgaggatgagagccaatcgggaagaactggatctcctgccaccagttggaggaatggctgttgatgtgatggaagtagaactccctgcgacgcgccgagcattcatgcttgtgcttgtacagacggccgcagtagtcgcagcgttgcacgggttgtatctcgtgaatgagttgtacctggcttcccttgacgagaaatttcagtgggaagccgaggcctggcgattgtatctcgtgctttactatgttgtctgcatcggcctgttcatcttctgtctcgatggtggtcatgctgacgagccctcgcgggaggcaagtccagacctcggcgcggcaggggcggagctcgaggacgagagcgcgcaggctggagctgtccagggtcctgagacgctgcggactcaggttagtaggcagtgtcaggagattaacttgcatgatcttttggagggcgtgcgggaggttcagatagtacttgatctcaacgggtccgttggtggagatgtcgatggcttgcagggttccgtgtcccttgggcgctaccaccgtgcccttgtttttcattttggacggcggtggctctgttgcttcttgcatgtttagaagcggtgtcgagggcgcgcaccgggcggcaggggcggctcgggacccggcggcatggctggcagtggtacgtcggcgccgcgcgcgggtaggttctggtactgcgccctgagaagactcgcatgcgcgacgacgcggcggttgacatcctggatctgacgcctctgggtgaaagctaccggccccgtgagcttgaacctgaaagagagttcaacagaatcaatctcggtatcgttgacggcggcttgcctaaggatttcttgcacgtcaccagagttgtcctggtaggcgatctccgccatgaactgctcgatctcttcctcttgaagatctccgcggcccgctctctcgacggtggccgcgaggtcgttggagatgcgcccaatgagttgagagaatgcattcatgcccgcctcgttccagacgcggctgtagaccacggcccccacgggatctctcgcgcgcatgaccacctgggcgaggttgagctccacgtggcgggtgaagaccgcatagttgcataggcgctggaaaaggtagttgagtgtggtggcgatgtgctcggtgacgaagaaatacatgatccatcgtctcagcggcatctcgctgacatcgcccagagcttccaagcgctccatggcctcgtagaagtccacggcaaaattaaaaaactgggagtttcgcgcggacacggtcaactcctcttccagaagacggataagttcggcgatggtggtgcgcacctcgcgctcgaaagcccctgggatttcttcctcaatctcttcttcttccactaacatctcttcctcttcaggtggggctgcaggaggagggggaacgcggcgacgccggcggcgcacgggcagacggtcgatgaatctttcaatgacctctccgcggcggcggcgcatggtttcagtgacggcgcggccgttctcgcgcggtcgcagagtaaaaacaccgccgcgcatctccttaaagtggtgactgggaggttctccgtttgggagggagagggcgctgattatacattttattaattggcccgtagggactgcacgcagagatctgatcgtgtcaagatccacgggatctgaaaacctttcgacgaaagcgtctaaccagtcacagtcacaaggtaggctgagtacggcttcttgtgggcgggggtggttatgtgttcggtctgggtcttctgtttcttcttcatctcgggaaggtgagacgatgctgctggtgatgaaattaaagtaggcagttctaagacggcggatggtggcgaggagcaccaggtctttgggtccggcttgctggatacgcaggcgattggccattccccaagcattatcctgacatctagcaagatctttgtagtagtcttgcatgagccgttctacgggcacttcttcctcacccgttctgccatgcatacgtgtgagtccaaatccgcgcattggttgtaccagtgccaagtcagctacgactctttcggcgaggatggcttgctgtacttgggtaagggtggcttgaaagtcatcaaaatccacaaagcggtggtaagctcctgtattaatggtgtaagcacagttggccatgactgaccagttaactgtctggtgaccagggcgcacgagctcggtgtatttaaggcgcgaataggcgcgggtgtcaaagatgtaatcgttgcaggtgcgcaccagatactggtaccctataagaaaatgcggcggtggttggcggtagagaggccatcgttctgtagctggagcgccaggggcgaggtcttccaacataaggcggtgatagccgtagatgtacctggacatccaggtgattcctgcggcggtagtagaagcccgaggaaactcgcgtacgcggttccaaatgttgcgtagcggcatgaagtagttcattgtaggcacggtttgaccagtgaggcgcgcgcagtcattgatgctctatagacacggagaaaatgaaagcgttcagcgactcgactccgtagcctggaggaacgtgaacgggttgggtcgcggtgtaccccggttcgagacttgtactcgagccggccggagccgcggctaacgtggtattggcactcccgtctcgacccagcctacaaaaatccaggatacggaatcgagtcgttttgctggtttccgaatggcagggaagtgagtcctattttttttttttgccgctcagatgcatcccgtgctgcgacagatgcgcccccaacaacagcccccctcgcagcagcagcagcagcaatcacaaaaggctgtccctgcaactactgcaactgccgccgtgagcggtgcgggacagcccgcctatgatctggacttggaagagggcgaaggactggcacgtctaggtgcgccttcacccgagcggcatccgcgagttcaactgaaaaaagattctcgcgaggcgtatgtgccccaacagaacctatttagagacagaagcggcgaggagccggaggagatgcgagcttcccgctttaacgcgggtcgtgagctgcgtcacggtttggaccgaagacgagtgttgcgggacgaggatttcgaagttgatgaaatgacagggatcagtcctgccagggcacacgtggctgcagccaaccttgtatcggcttacgagcagacagtaaaggaagagcgtaacttccaaaagtcttttaataatcatgtgcgaaccctgattgcccgcgaagaagttacccttggtttgatgcatttgtgggatttgatggaagctatcattcagaaccctactagcaaacctctgaccgcccagctgtttctggtggtgcaacacagcagagacaatgaggctttcagagaggcgctgctgaacatcaccgaacccgaggggagatggttgtatgatcttatcaacattctacagagtatcatagtgcaggagcggagcctgggcctggccgagaaggtggctgccatcaattactcggttttgagcttgggaaaatattacgctcgcaaaatctacaagactccatacgttcccatagacaaggaggtgaagatagatgggttctacatgcgcatgacgctcaaggtcttgaccctgagcgatgatcttggggtgtatcgcaatgacagaatgcatcgcgcggttagcgccagcaggaggcgcgagttaagcgacagggaactgatgcacagtttgcaaagagctctgactggagctggaaccgagggtgagaattacttcgacatgggagctgacttgcagtggcagcctagtcgcagggctctgagcgccgcgacggcaggatgtgagcttccttacatagaagaggcggatgaaggcgaggaggaagagggcgagtacttggaagactgatggcacaacccgtgttttttgctagatggaacagcaagcaccggatcccgcaatgcgggcggcgctgcagagccagccgtccggcattaactcctcggacgattggacccaggccatgcaacgtatcatggcgttgacgactcgcaaccccgaagcctttagacagcaaccccaggccaaccgtctatcggccatcatggaagctgtagtgccttcccgctctaatcccactcatgagaaggtcctggccatcgtgaacgcgttggtggagaacaaagctattcgtccagatgaggccggactggtatacaacgctctcttagaacgcgtggctcgctacaacagtagcaatgtgcaaaccaatttggaccgtatgataacagatgtacgcgaagccgtgtctcagcgcgaaaggttccagcgtgatgccaacctgggttcgctggtggcgttaaatgctttcttgagtactcagcctgctaatgtgccgcgtggtcaacaggattatactaactttttaagtgctttgagactgatggtatcagaagtacctcagagcgaagtgtatcagtccggtcctgattacttctttcagactagcagacagggcttgcagacggtaaatctgagccaagcttttaaaaaccttaaaggtttgtggggagtgcatgccccggtaggagaaagagcaaccgtgtctagcttgttaactccgaactcccgcctattattactgttggtagctcctttcaccgacagcggtagcatcgaccgtaattcctatttgggttacctactaaacctgtatcgcgaagccatagggcaaagtcaggtggacgagcagacctatcaagaaattacccaagtcagtcgcgctttgggacaggaagacactggcagtttggaagccactctgaacttcttgcttaccaatcggtctcaaaagatccctcctcaatatgctcttactgcggaggaggagaggatccttagatatgtgcagcagagcgtgggattgtttctgatgcaagagggggcaactccgactgcagcactggacatgacagcgcgaaatatggagcccagcatgtatgccagtaaccgacctttcattaacaaactgctggactacttgcacagagctgccgctatgaactctgattatttcaccaatgccatcttaaacccgcactggctgcccccacctggtttctacacgggcgaatatgacatgcccgaccctaatgacggatttctgtgggacgacgtggacagcgatgttttttcacctctttctgatcatcgcacgtggaaaaaggaaggcggcgatagaatgcattcttctgcatcgctgtccggggtcatgggtgctaccgcggctgagcccgagtctgcaagtccttttcctagtctacccttttctctacacagtgtacgtagcagcgaagtgggtagaataagtcgcccgagtttaatgggcgaagaggagtatctaaacgattccttgctcagaccggcaagagaaaaaaatttcccaaacaatggaatagaaagtttggtggataaaatgagtagatggaagacttatgctcaggatcacagagacgagcctgggatcatggggattacaagtagagcgagccgtagacgccagcgccatgacagacagaggggtcttgtgtgggacgatgaggattcggccgatgatagcagcgtgctggacttgggtgggagaggaaggggcaacccgtttgctcatttgcgccctcgcttgggtggtatgttgtaaaaaaaaataaaaaaaaaactcaccaaggccatggcgacgagcgtacgttcgttcttctttattatctgtgtctagtataatgaggcgagtcgtgctaggcggagcggtggtgtatccggagggtcctcctccttcgtacgagagcgtgatgcagcagcagcaggcgacggcggtgatgcaatccccactggaggctccctttgtgcctccgcgatacctggcacctacggagggcagaaacagcattcgttattcggaactggcacctcagtacgataccaccaggttgtatctggtggacaacaagtcggcggacattgcttctctgaactatcagaatgaccacagcaacttcttgaccacggtggtgcaaaacaatgactttacccctacggaagccagcacccagaccattaactttgatgaacgatcgcggtggggcggtcagctaaagaccatcatgcatactaacatgccaaacgtgaacgagtatatgtttagtaacaagttcaaagcgcgtgtgatggtgtccagaaaacctcccgacggtgctgcagttggggatacttatgatcacaagcaggatattttgaaatatgagtggttcgagtttactttgccagaaggcaacttttcagttactatgactattgatttgatgaacaatgccatcatagataattacttgaaagtgggtagacagaatggagtgcttgaaagtgacattggtgttaagttcgacaccaggaacttcaagctgggatgggatcccgaaaccaagttgatcatgcctggagtgtatacgtatgaagccttccatcctgacattgtcttactgcctggctgcggagtggattttaccgagagtcgtttgagcaaccttcttggtatcagaaaaaaacagccatttcaagagggttttaagattttgtatgaagatttagaaggtggtaatattccggccctcttggatgtagatgcctatgagaacagtaagaaagaacaaaaagccaaaatagaagctgctacagctgctgcagaagctaaggcaaacatagttgccagcgactctacaagggttgctaacgctggagaggtcagaggagacaattttgcgccaacacctgttccgactgcagaatcattattggccgatgtgtctgaaggaacggacgtgaaactcactattcaacctgtagaaaaagatagtaagaatagaagctataatgtgttggaagacaaaatcaacacagcctatcgcagttggtatctttcgtacaattatggcgatcccgaaaaaggagtgcgttcctggacattgctcaccacctcagatgtcacctgcggagcagagcaggtctactggtcgcttccagacatgatgaaggatcctgtcactttccgctccactagacaagtcagtaactaccctgtggtgggtgcagagcttatgcccgtcttctcaaagagcttctacaacgaacaagctgtgtactcccagcagctccgccagtccacctcgcttacgcacgtcttcaaccgctttcctgagaaccagattttaatccgtccgccggcgcccaccattaccaccgtcagtgaaaacgttcctgctctcacagatcacgggaccctgccgttgcgcagcagtatccggggagtccaacgtgtgaccgttactgacgccagacgccgcacctgtccctacgtgtacaaggcactgggcatagtcgcaccgcgcgtcctttcaagccgcactttctaaaaaaaaaaaaaatgtccattcttatctcgcccagtaataacaccggttggggtctgcgcgctccaagcaagatgtacggaggcgcacgcaaacgttctacccaacatcctgtccgtgttcgcggacattttcgcgctccatggggcgccctcaagggccgcactcgcgttcgaaccaccgtcgatgatgtaatcgatcaggtggttgccgacgcccgtaattatactcctactgcgcctacatctactgtggatgcagttattgacagtgtagtggctgacgctcgcaactatgctcgacgtaagagccggcgaaggcgcattgccagacgccaccgagctaccactgccatgcgagccgcaagagctctgctacgaagagctagacgcgtggggcgaagagccatgcttagggcggccagacgtgcagcttcgggcgccagcgccggcaggtcccgcaggcaagcagccgctgtcgcagcggcgactattgccgacatggcccaatcgcgaagaggcaatgtatactgggtgcgtgacgctgccaccggtcaacgtgtacccgtgcgcacccgtccccctcgcacttagaagatactgagcagtctccgatgttgtgtcccagcggcgaggatgtccaagcgcaaatacaaggaagaaatgctgcaggttatcgcacctgaagtctacggccaaccgttgaaggatgaaaaaaaaccccgcaaaatcaagcgggttaaaaaggacaaaaaagaagaggaagatggcgatgatgggctggcggagtttgtgcgcgagtttgccccacggcgacgcgtgcaatggcgtgggcgcaaagttcgacatgtgttgagacctggaacttcggtggtctttacacccggcgagcgttcaagcgctacttttaagcgttcctatgatgaggtgtacggggatgatgatattcttgagcaggcggctgaccgattaggcgagtttgcttatggcaagcgtagtagaataacttccaaggatgagacagtgtcgatacccttggatcatggaaatcccacccctagtcttaaaccggtcactttgcagcaagtgttacccgtaactccgcgaacaggtgttaaacgcgaaggtgaagatttgtatcccactatgcaactgatggtacccaaacgccagaagttggaggacgttttggagaaagtaaaagtggatccagatattcaacctgaggttaaagtgagacccattaagcaggtagcgcctggtctgggggtacaaactgtagacattaagattcccactgaaagtatggaagtgcaaactgaacccgcaaagcctactgccacctccactgaagtgcaaacggatccatggatgcccatgcctattacaactgacgccgccggtcccactcgaagatcccgacgaaagtacggtccagcaagtctgttgatgcccaattatgttgtacacccatctattattcctactcctggttaccgaggcactcgctactatcgcagccgaaacagtacctcccgccgtcgccgcaagacacctgcaaatcgcagtcgtcgccgtagacgcacaagcaaaccgactcccggcgccctggtgcggcaagtgtaccgcaatggtagtgcggaacctttgacactgccgcgtgcgcgttaccatccgagtatcatcacttaatcaatgttgccgctgcctccttgcagatatggccctcacttgtcgccttcgcgttcccatcactggttaccgaggaagaaactcgcgccgtagaagagggatgttgggacgcggaatgcgacgctacaggcgacggcgtgctatccgcaagcaattgcggggtggttttttaccagccttaattccaattatcgctgctgcaattggcgcgataccaggcatagcttccgtggcggttcaggcctcgcaacgacattgacattggaaaaaaacgtataaataaaaaaaaaaaaatacaatggactctgacactcctggtcctgtgactatgttttcttagagatggaagacatcaatttttcatccttggctccgcgacacggcacgaagccgtacatgggcacctggagcgacatcggcacgagccaactgaacgggggcgccttcaattggagcagtatctggagcgggcttaaaaattttggctcaaccataaaaacatacgggaacaaagcttggaacagcagtacaggacaggcgcttagaaataaacttaaagaccagaacttccaacaaaaagtagtcgatgggatagcttccggcatcaatggagtggtagatttggctaaccaggctgtgcagaaaaagataaacagtcgtttggacccgccgccagcaaccccaggtgaaatgcaagtggaggaagaaattcctccgccagaaaaacgaggcgacaagcgtccgcgtcccgatttggaagagacgctggtgacgcgcgtagatgaaccgccttcttatgaggaagcaacgaagcttggaatgcccaccactagaccgatagccccaatggccaccggggtgatgaaaccttctcagttgcatcgacccgtcaccttggatttgccccctccccctgctgctactgctgtacccgcttctaagcctgtcgctgccccgaaaccagtcgccgtagccaggtcacgtcccgggggcgctcctcgtccaaatgcgcactggcaaaatactctgaacagcatcgtgggtctaggcgtgcaaagtgtaaaacgccgtcgctgcttttaattaaatatggagtagcgcttaacttgcctatctgtgtatatgtgtcattacacgccgtcacagcagcagaggaaaaaaggaagaggtcgtgcgtcgacgctgagttactttcaagatggccaccccatcgatgctgccccaatgggcatacatgcacatcgccggacaggatgcttcggagtacctgagtccgggtctggtgcagttcgcccgcgccacagacacctacttcaatctgggaaataagtttagaaatcccaccgtagcgccgacccacgatgtgaccaccgaccgtagccagcggctcatgttgcgcttcgtgcccgttgaccgggaggacaatacatactcttacaaagtgcggtacaccctggccgtgggcgacaacagagtgctggatatggccagcacgttctttgacattaggggtgtgttggacagaggtcccagtttcaaaccctattctggtacggcttacaactccctggctcctaaaggcgctccaaatacatctcagtggattgcagaaggtgtaaaaaatacaactggtgaggaacacgtaacagaagaggaaaccaatactactacttacacttttggcaatgctcctgtaaaagctgaagctgaaattacaaaagaaggactcccagtaggtttggaagtttcagatgaagaaagtaaaccgatttatgctgataaaacatatcagccagaacctcagctgggagatgaaacttggactgaccttgatggaaaaaccgaaaagtatggaggcagggctctcaaacccgatactaagatgaaaccatgctacgggtcctttgccaaacctactaatgtgaaaggcggtcaggcaaaacaaaaaacaacggagcagccaaatcagaaagtcgaatatgatatcgacatggagttttttgatgcggcatcgcagaaaacaaacttaagtcctaaaattgtcatgtatgcagaaaatgtaaatttggaaactccagacactcatgtagtgtacaaacctggaacagaagacacaagttccgaagctaatttgggacaacaatctatgcccaacagacccaactacattggcttcagagataactttattggacttatgtactataacagtactggtaacatgggggtgctggctggtcaagcgtctcagttaaatgcagtggttgacttgcaggacagaaacacagaactttcttaccaactcttgcttgactctctgggcgacagaaccagatactttagcatgtggaatcaggctgtggacagttatgatcctgatgtacgtgttattgaaaatcatggtgtggaagatgaacttcccaactactgttttccactggacggcataggtgttccaacaaccagttacaaatcaatagttccaaatggagacaatgcgcctaattggaaggaacctgaagtaaatggaacaagtgagatcggacagggtaatttgtttgccatggaaattaaccttcaagccaatctatggcgaagtttcctttattccaatgtggctctatatctcccagactcgtacaaatacaccccgtccaatgtcactcttccagaaaacaaaaacacctacgactacatgaacgggcgggtggtgccgccatctctagtagacacctatgtgaacattggtgccaggtggtctctggatgccatggacaatgtcaacccattcaaccaccaccgtaacgctggcttgcgttaccgatccatgcttctgggtaacggacgttatgtgcctttccacatacaagtgcctcaaaaattcttcgctgttaaaaacctgctgcttctcccaggctcctacacttatgagtggaactttaggaaggatgtgaacatggttctacagagttccctcggtaacgacctgcgggtagatggcgccagcatcagtttcacgagcatcaacctctatgctacttttttccccatggctcacaacaccgcttccacccttgaagccatgctgcggaatgacaccaatgatcagtcattcaacgactacctatctgcagctaacatgctctaccccattcctgccaatgcaaccaatattcccatttccattccttctcgcaactgggcggctttcagaggctggtcatttaccagactgaaaaccaaagaaactccctctttggggtctggatttgacccctactttgtctattctggttctattccctacctggatggtaccttctacctgaaccacacttttaagaaggtttccatcatgtttgactcttcagtgagctggcctggaaatgacaggttactatctcctaacgaatttgaaataaagcgcactgtggatggcgaaggctacaacgtagcccaatgcaacatgaccaaagactggttcttggtacagatgctcgccaactacaacatcggctatcagggcttctacattccagaaggatacaaagatcgcatgtattcatttttcagaaacttccagcccatgagcaggcaggtggttgatgaggtcaattacaaagacttcaaggccgtcgccataccctaccaacacaacaactctggctttgtgggttacatggctccgaccatgcgccaaggtcaaccctatcccgctaactatccctatccactcattggaacaactgccgtaaatagtgttacgcagaaaaagttcttgtgtgacagaaccatgtggcgcataccgttctcgagcaacttcatgtctatgggggcccttacagacttgggacagaatatgctctatgccaactcagctcatgctctggacatgacctttgaggtggatcccatggatgagcccaccctgctttatcttctcttcgaagttttcgacgtggtcagagtgcatcagccacaccgcggcatcatcgaggcagtctacctgcgtacaccgttctcggccggtaacgctaccacgtaagaagcttcttgcttcttgcaaatagcagctgcaaccatggcctgcggatcccaaaacggctccagcgagcaagagctcagagccattgtccaagacctgggttgcggaccctattttttgggaacctacgataagcgcttcccggggttcatggcccccgataagctcgcctgtgccattgtaaatacggccggacgtgagacggggggagagcactggttggctttcggttggaacccacgttctaacacctgctacctttttgatccttttggattctcggatgatcgtctcaaacagatttaccagtttgaatatgagggtctcctgcgccgcagcgctcttgctaccaaggaccgctgtattacgctggaaaaatctacccagaccgtgcagggtccccgttctgccgcctgcggacttttctgctgcatgttccttcacgcctttgtgcactggcctgaccgtcccatggacggaaaccccaccatgaaattgctaactggagtgccaaacaacatgcttcattctcctaaagtccagcccaccctgtgtgacaatcaaaaagcactctaccattttcttaatacccattcgccttattttcgctcccatcgtacacacatcgaaagggccactgcgttcgaccgtatggatgttcaataatgactcatgtaaacaacgtgttcaataaacatcactttatttttttacatgtatcaaggctctgcattacttatttatttacaagtcgaatgggttctgacgagaatcagaatgacccgcaggcagtgatacgttgcggaactgatacttgggttgccacttgaattcgggaatcaccaacttgggaaccggtatatcgggcaggatgtcactccacagctttctggtcagctgcaaagctccaagcaggtcaggagccgaaatcttgaaatcacaattaggaccagtgctttgagcgcgagagttgcggtacaccggattgcagcactgaaacaccatcagcgacggatgtctcacgcttgccagcacggtgggatctgcaatcatgcccacatccagatcttcagcattggcaatgctgaacggggtcatcttgcaggtctgcctacccatggcgggcacccaattaggcttgtggttgcaatcgcagtgcagggggatcagtatcatcttggcctgatcctgtctgattcctggatacacggctctcatgaaagcatcatattgcttgaaagcctgctgggctttactaccctcggtataaaacatcccgcaggacctgctcgaaaactggttagctgcacagccggcatcattcacacagcagcgggcgtcattgttagctatttgcaccacacttctgccccagcggttttgggtgattttggttcgctcgggattctcctttaaggctcgttgtccgttctcgctggccacatccatctcgataatctgctccttctgaatcataatattgccatgcaggcacttcagcttgccctcataatcattgcagccatgaggccacaacgcacagcctgtacattcccaattatggtgggcgatctgagaaaaagaatgtatcattccctgcagaaatcttcccatcatcgtgctcagtgtcttgtgactagtgaaagttaactggatgcctcggtgctcctcgtttacgtactggtgacagatgcgcttgtattgttcgtgttgctcaggcattagtttaaaagaggttctaagttcgttatccagcctgtacttctccatcagcagacacatcacttccatgcctttctcccaagcagacaccaggggcaagctaatcggattcttaacagtgcaggcagcagctcctttagccagagggtcatctttagcgatcttctcaatgcttcttttgccatccttctcaacgatgcgcacgggcgggtagctgaaacccactgctacaagttgcgcctcttctctttcttcttcgctgtcttgactgatgtcttgcatggggatatgtttggtcttccttggcttctttttggggggtatcggaggaggaggactgtcgctccgttccggagacagggaggattgtgacgtttcgctcaccattaccaactgactgtcggtagaagaacctgaccccacacggcgacaggtgtttctcttcgggggcagaggtggaggcgattgcgaagggctgcggtccgacctggaaggcggatgactggcagaaccccttccgcgttcgggggtgtgctccctgtggcggtcgcttaactgatttccttcgcggctggccattgtgttctcctaggcagagaaacaacagacatggaaactcagccattgctgtcaacatcgccacgagtgccatcacatctcgtcctcagcgacgaggaaaaggagcagagcttaagcattccaccgcccagtcctgccaccacctctaccctagaagataaggaggtcgacgcatctcatgacatgcagaataaaaaagcgaaagagtctgagacagacatcgagcaagacccgggctatgtgacaccggtggaacacgaggaagagttgaaacgctttctagagagagaggatgaaaactgcccaaaacaacgagcagataactatcaccaagatgctggaaatagggatcagaacaccgactacctcatagggcttgacggggaagacgcgctccttaaacatctagcaagacagtcgctcatagtcaaggatgcattattggacagaactgaagtgcccatcagtgtggaagagctcagccgcgcctacgagcttaacctcttttcacctcgtactccccccaaacgtcagccaaacggcacctgcgagccaaatcctcgcttaaacttttatccagcttttgctgtgccagaagtactggctacctatcacatcttttttaaaaatcaaaaaattccagtctcctgccgcgctaatcgcacccgcgccgatgccctactcaatctgggacctggttcacgcttacctgatatagcttccttggaagaggttccaaagatcttcgagggtctgggcaataatgagactcgggccgcaaatgctctgcaaaagggagaaaatggcatggatgagcatcacagcgttctggtggaattggaaggcgataatgccagactcgcagtactcaagcgaagcatcgaggtcacacacttcgcatatcccgctgtcaacctgccccctaaagtcatgacggcggtcatggaccagttactcattaagcgcgcaagtcccctttcagaagacatgcatgacccagatgcctgtgatgagggtaaaccagtggtcagtgatgagcagctaacccgatggctgggcaccgactctcccagggatttggaagagcgtcgcaagcttatgatggccgtggtgctggttaccgtagaactagagtgtctccgacgtttctttaccgattcagaaaccttgcgcaaactcgaagagaatctgcactacacttttagacacggctttgtgcggcaggcatgcaagatatctaacgtggaactcaccaacctggtttcctacatgggtattctgcatgagaatcgcctaggacaaagcgtgctgcacagcaccctgaagggggaagcccgccgtgattacatccgcgattgtgtctatctgtacctgtgccacacgtggcaaaccggcatgggtgtatggcagcaatgtttagaagaacagaacttgaaagagcttgacaagctcttacagaaatctcttaaggttctgtggacagggttcgacgagcgcaccgtcgcttccgacctggcagacctcatcttcccagagcgtctcagggttactttgcgaaacggattgcctgactttatgagccagagcatgcttaacaattttcgctctttcatcctggaacgctccggtatcctgcccgccacctgctgcgcactgccctccgactttgtgcctctcacctaccgcgagtgccccccgccgctatggagtcactgctacctgttccgtctggccaactatctctcctaccactcggatgtgatcgaggatgtgagcggagacggcttgctggagtgtcactgccgctgcaatctgtgcacgccccaccggtccctagcttgcaacccccagttgatgagcgaaacccagataataggcacctttgaattgcaaggccccagcagccaaggcgatgggtcttctcctgggcaaagtttaaaactgaccccgggactgtggacctccgcctacttgcgcaagtttgctccggaagattaccacccctatgaaatcaagttctatgaggaccaatcacagcctccaaaggccgaactttcggcctgcgtcatcacccagggggcaattctggcccaattgcaagccatccaaaaatcccgccaagaatttctactgaaaaagggtaagggggtctaccttgacccccagaccggcgaggaactcaacacaaggttccctcaggatgtcccaacgacgagaaaacaagaagttgaaggtgcagccgccgcccccagaagatatggaggaagattgggacagtcaggcagaggaggcggaggaggacagtctggaggacagtctggaggaagacagtttggaggaggaaaacgaggaggcagaggaggtggaagaagtaaccgccgacaaacagttatcctcggctgcggagacaagcaacagcgctaccatctccgctccgagtcgaggaacccggcggcgtcccagcagtagatgggacgagaccggacgcttcccgaacccaaccagcgcttccaagaccggtaagaaggatcggcagggatacaagtcctggcgggggcataagaatgccatcatctcctgcttgcatgagtgcgggggcaacatatccttcacgcggcgctacttgctattccaccatggggtgaactttccgcgcaatgttttgcattactaccgtcacctccacagcccctactatagccagcaaatcccggcagtctcgacagataaagacagcggcggcgacctccaacagaaaaccagcagcggcagttagaaaatacacaacaagtgcagcaacaggaggattaaagattacagccaacgagccagcgcaaacccgagagttaagaaatcggatctttccaaccctgtatgccatcttccagcagagtcggggtcaagagcaggaactgaaaataaaaaaccgatctctgcgttcgctcaccagaagttgtttgtatcacaagagcgaagatcaacttcagcgcactctcgaggacgccgaggctctcttcaacaagtactgcgcgctgactcttaaagagtaggcagcgaccgcgcttattcaaaaaaggcgggaattacatcatcctcgacatgagtaaagaaattcccacgccttacatgtggagttatcaaccccaaatgggattggcggcaggcgcctcccaggactactccacccgcatgaattggctcagcgccgggccttctatgatttctcgagttaatgatatacgcgcctaccgaaaccaaatacttttggaacagtcagctcttaccaccacgccccgccaacaccttaatcccagaaattggcccgccgccctagtgtaccaggaaagtcccgctcccaccactgtattacttcctcgagacgcccaggccgaagtccaaatgactaatgcaggtgcgcagttagctggcggctccaccctatgtcgtcacaggcctcggcataatataaaacgcctgatgatcagaggccgaggtatccagctcaacgacgagtcggtgagctctccgcttggtctacgaccagacggaatctttcagattgccggctgcgggagatcttccttcacccctcgtcaggctgttctgactttggaaagttcgtcttcgcaaccccgctcgggcggaatcgggaccgttcaatttgtggaggagtttactccctctgtctacttcaaccccttctccggatctcctgggcattacccggacgagttcataccgaacttcgacgcgattagcgagtcagtggacggctacgattgatgtctggtgacgcggctgagctatctcggctgcgacatctagaccactgccgccgctttcgctgctttgcccgggaactcattgagttcatctacttcgaactccccaaggatcaccctcaaggtccggcccacggagtgcggatttctatcgaaggcaaaatagactctcgcctgcaacgaattttctcccagcggcccgtgctgatcgagcgagaccagggaaacaccacggtttccatctactgcatttgtaatcaccccggattgcatgaaagcctttgctgtcttatgtgtactgagtttaataaaaactgaattaagactctcctacggactgccgcttcttcaacccggattttacaaccagaagaacgaaacttttcctgtcgtccaggactctgttaacttcacctttcctactcacaaactagaagctcaacgactacaccgcttttccagaagcattttccctactaatactactttcaaaaccggaggtgagctccaaggtcttcctacagaaaacccttgggtggaagcgggccttgtagtgctaggaattcttgcgggtgggcttgtgattattctttgctacctatacacaccttgcttcactttcttagtggtgttgtggtattggtttaaaaaatggggcccatactagtcttgcttgttttactttcgcttttggaaccgggttctgccaattacgatccatgtctagacttcgacccagaaaactgcacacttacttttgcacccgacacaagccgcatctgtggagttcatcgcctctcttacgaacttggcccccaacgacaaaaatttacctgcatggtgggaatcaaccccatagttatcacccagcaaagtggagatactaagggttgcattcactgctcctgcgattccatcgagtgcacctacaccctgctgaagaccctatgcggcctaagagacctgctaccaatgaattaaaaaatgattaataaaaaatcacttacttgaaatcagcaataaggtctctgttgaaattttctcccagcagcacctcacttccctcttcccaactctggtattctaaaccccgttcagcggcatactttctccatactttaaaggggatgtcaaattttagctcctctcctgtacccacaatcttcatgtctttcttcccagatgaccaagagagtccggctcagtgactccttcaaccctgtctacccctatgaagatgaaagcacctcccaacacccctttataaacccagggtttatttccccaaatggcttcacacaaagcccaaacggagttcttactttaaaatgtttaaccccactaacaaccacaggcggatctctacagctaaaagtgggagggggacttacagtggatgacaccaacggttttttgaaagaaaacataagtgccaccacaccactcgttaagactggtcactctataggtttaccactaggagccggattgggaacgaatgaaaataaactttgtatcaaattaggacaaggacttacattcaattcaaacaacatttgcattgatgacaatattaacaccttatggacaggagtcaaccccaccgaagccaactgtcaaatcatgaactccagtgaatctaatgattgcaaattaattctaacactagttaaaactggagcactagtcactgcatttgtttatgttataggagtatctaacaattttaatatgctaactacacacagaaatataaattttactgcagagctgtttttcgattctactggtaatttactaactagactctcatccctcaaaactccacttaatcataaatcaggacaaaacatggctactggtgccattactaatgctaaaggtttcatgcccagcacgactgcctatcctttcaatgataattctagagaaaaagaaaactacatttacggaacttgttactacacagctagtgatcgcactgcttttcccattgacatatctgtcatgcttaaccgaagagcaataaatgacgagacatcatattgtattcgtataacttggtcctggaacacaggagatgccccagaggtgcaaacctctgctacaaccctagtcacctccccatttaccttttactacatcagagaagacgactgacaaataaagtttgcgatcgctgctaatcctttctctcttcaggccaccatgggatggagctgtatcatcctcttcttggtagcaacagctacaggtgtccactccgaggttcagctggtggagtctggcggtggcctggtgcagccagggggctcactccgtttgtcctgtgcagcttctggctataccttcaccaactatggtatgaactgggtccgtcaggccccgggtaagggcctggaatgggttggatggattaacacctataccggtgaaccgacctatgctgcggatttcaaacgtcgttttactttttctctggacacctccaagagcacagcttacctgcagatgaacagcctgcgcgctgaggacactgccgtctattactgtgcaaagtacccgcactattatgggagcagccactggtatttcgacgtctggggtcaaggaaccctggtcaccgtctcctcggcctccaccaagggcccatcggtcttccccctggcaccctcctccaagagcacctctgggggcacagcggccctgggctgcctggtcaaggactacttccccgaaccggtgacggtgtcgtggaactcaggcgccctgaccagcggcgtgcacaccttcccggctgtcctacagtcctcaggactctactccctcagcagcgtggtgaccgtgccctccagcagcttgggcacccagacctacatctgcaacgtgaatcacaagcccagcaacaccaaggtcgacaagaaagttgagcccaaatcttgtgacaaaactcacacatgcccaccgtgcccagcacctgagctcctggggggaccgtcagtcttcctcttccccccaaaacccaaggacaccctcatgatctcccggacccctgaggtcacatgcgtggtggtggacgtgagccacgaagaccctgaggtcaagttcaactggtacgtggacggcgtggaggtgcataatgccaagacaaagccgcgggaggagcagtacaacagcacgtaccgtgtggtcagcgtcctcaccgtcctgcaccaggactggctgaatggcaaggagtacaagtgcaaggtctccaacaaagccctcccagcccccatcgagaaaaccatctccaaagccaaagggcagccccgagaaccacaggtgtacaccctgcccccatcccgggaggagatgaccaagaaccaggtcagcctgacctgcctggtcaaaggcttctatcccagcgacatcgccgtggagtgggagagcaatgggcagccggagaacaactacaagaccacgcctcccgtgctggactccgacggctccttcttcctctacagcaagctcaccgtggacaagagcaggtggcagcaggggaacgtcttctcatgctccgtgatgcacgaggctctgcacaaccactacacgcagaagagcctctccctgtctccgggtaaatgatctagactcgaggtttctagaagttgtctcctcctgcactgactgactgacctaacgttactggccgaagccgcttggaataaggccggtgtgcgtttgtctatatgttattttccaccatattgccgtcttttggcaatgtgagggcccggaaacctggccctgtcttcttgacgagcattcctaggggtctttcccctctcgccaaaggaatgcaaggtctgttgaatgtcgtgaaggaagcagttcctctggaagcttcttgaagacaaacaacgtctgtagcgaccctttgcaggcagcggaaccccccacctggcgacaggtgcctctgcggccaaaagccacgtgtataagatacacctgcaaaggcggcacaaccccagtgccacgttgtgagttggatagttgtggaaagagtcaaatggctcccctcaagcgtattcaacaaggggctgaaggatgcccagaaggtaccccattgtatgggatctgatctggggcctcggtgcacatgcttttcatgtgtttagtcgaggttaaaaaacgtctaggccccccgaaccacggggacgtggttttcctttgaaaaacacgatgataataacatgggatggagctgtatcatcctcttcttggtagcaacagctacaggtgtccactccgatatccagatgacccagtccccgagctccctgtccgcctctgtgggcgatagggtcaccatcacctgcagcgcaagtcaggatattagcaactatttaaactggtatcaacagaaaccaggaaaagctccgaaagtcctgatttacttcacctcctctctccactctggagtcccttctcgcttctctggatccggttctgggacggatttcactctgaccatcagcagtctgcagccagaagacttcgcaacttattactgtcaacagtatagcaccgtgccgtggacgtttggacagggtaccaaggtggagatcaaacgaactgtggctgcaccatctgtcttcatcttcccgccatctgatgagcagttgaaatctggaactgcttctgttgtgtgcctgctgaataacttctatcccagagaggccaaagtacagtggaaggtggataacgccctccaatcgggtaactcccaggagagtgtcacagagcaggacagcaaggacagcacctacagcctcagcagcaccctgacgctgagcaaagcagactacgagaaacacaaagtctacgcctgcgaagtcacccatcagggcctgagctcgcccgtcacaaagagcttcaacaggggagagtgttaagctagcttgactgactgagatacagcgtaccttcagctcacagacatgataagatacattgatgagtttggacaaaccacaactagaatgcagtgaaaaaaatgctttatttgtgaaatttgtgatgctattgctttatttgtaaccattataagctgcaataaacaagttaacaacaacaattgcattcattttatgtttcaggttcagggggaggtgtgggaggttttttaaagcaagtaaaacctctacaaatgtggtagtcgtcagctatcctgcaggaacttgtttatttgaaaatcaattcacaaaatccgagtagttattttgcctcccccttcccatttaacagaatacaccaatctctccccacgcacagctttaaacatttggataccattagatatagacatggttttagattccacattccaaacagtttcagagcgagccaatctggggtcagtgatagataaaaatccatcgggatagtcttttaaagcgctttcacagtccaactgctgcggatgcgactccggagtctggatcacggtcatctggaagaagaacgatgggaatcataatccgaaaacggtatcggacgattgtgtctcatcaaacccacaagcagccgctgtctgcgtcgctccgtgcgactgctgtttatgggatcagggtccacagtgtcctgaagcatgattttaatagcccttaacatcaactttctggtgcgatgcgcgcagcaacgcattctgatttcactcaaatctttgcagtaggtacaacacattattacaatattgtttaataaaccataattaaaagcgctccagccaaaactcatatctgatataatcgcccctgcatgaccatcataccaaagtttaatataaattaaatgacgttccctcaaaaacacactacccacatacatgatctcttttggcatgtgcatattaacaatctgtctgtaccatggacaacgttggttaatcatgcaacccaatataaccttccggaaccacactgccaacaccgctcccccagccatgcattgaagtgaaccctgctgattacaatgacaatgaagaacccaattctctcgaccgtgaatcacttgagaatgaaaaatatctatagtggcacaacatagacataaatgcatgcatcttctcataatttttaactcctcaggatttagaaacatatcccagggaataggaagctcttgcagaacagtaaagctggcagaacaaggaagaccacgaacacaacttacactatgcatagtcatagtatcacaatctggcaacagcgggtggtcttcagtcatagaagctcgggtttcattttcctcacaacgtggtaactgggctctggtgtaagggtgatgtctggcgcatgatgtcgagcgtgcgcgcaaccttgtcataatggagttgcttcctgacattctcgtattttgtatagcaaaacgcggccctggcagaacacactcttcttcgccttctatcctgccgcttagcgtgttccgtgtgatagttcaagtacaaccacactcttaagttggtcaaaagaatgctggcttcagttgtaatcaaaactccatcgcatctaatcgttctgaggaaatcatccaagcaatgcaactggattgtgtttcaagcaggagaggagagggaagagacggaagaaccatgttaatttttattccaaacgatctcgcagtacttcaaattgtagatcgcgcagatggcatctctcgcccccactgtgttggtgaaaaagcacagctagatcaaaagaaatgcgattttcaaggtgctcaacggtggcttccagcaaagcctccacgcgcacatccaagaacaaaagaataccaaaagaaggagcattttctaactcctcaatcatcatattacattcctgcaccattcccagataattttcagctttccagccttgaattattcgtgtcagttcttgtggtaaatccaatccacacattacaaacaggtcccggagggcgccctccaccaccattcttaaacacaccctcataatgacaaaatatcttgctcctgtgtcacctgtagcgaattgagaatggcaacatcaattgacatgcccttggctctaagttcttctttaagttctagttgtaaaaactctctcatattatcaccaaactgcttagccagaagccccccgggaacaagagcaggggacgctacagtgcagtacaagcgcagacctccccaattggctccagcaaaaacaagattggaataagcatattgggaaccgccagtaatatcatcgaagttgctggaaatataatcaggcagagtttcttgtaaaaattgaataaaagaaaaatttgccaaaaaaacattcaaaacctctgggatgcaaatgcaataggttaccgcgctgcgctccaacattgttagttttgaattagtctgcaaaaataaaaaaaaaaacaagcgtcatatcatagtagcctgacgaacagatggataaatcagtctttccatcacaagacaagccacagggtctccagctcgaccctcgtaaaacctgtcatcatgattaaacaacagcaccgaaagttcctcgcggtgaccagcatgaataattcttgatgaagcatacaatccagacatgttagcatcagttaacgagaaaaaacagccaacatagcctttgggtataattatgcttaatcgtaagtatagcaaagccacccctcgcggatacaaagtaaaaggcacaggagaataaaaaatataattatttctctgctgctgttcaggcaacgtcgcccccggtccctctaaatacacatacaaagcctcatcagccatggcttaccagacaaagtacagcgggcacacaaagcacaagctctaaagtgactctccaacctctccacaatatatatatacacaagccctaaactgacgtaatgggagtaaagtgtaaaaaatcccgccaaacccaacacacaccccgaaactgcgtcaccagggaaaagtacagtttcacttccgcaatcccaacaggcgtaacttcctctttctcacggtacgtgatatcccactaacttgcaacgtcattttcccacggtcgcaccgccccttttagccgttaaccccacagccaatcaccacacgatccacactttttaaaatcacctcatttacatattggcaccattccatctataaggtatattatatagataga

SEQ ID NO: 2 - DNA, 35355 bp, Artificial Sequence
  NG-135 virus genome sequence
tctatctatataatataccttatagatggaatggtgccaatatgtaaatgaggtgattttaaaaagtgtggatcgtgtggtgattggctgtggggttaacggctaaaaggggcggtgcgaccgtgggaaaatgacgttttgtgggggtggagtttttttgcaagttgtcgcgggaaatgtgacgcataaaaaggcttttttctcacggaactacttagttttcccacggtatttaacaggaaatgaggtagttttgaccggatgcaagtgaaaattgttgattttcgcgcgaaaactgaatgaggaagtgtttttctgaataatgtggtatttatggcagggtggagtatttgttcagggccaggtagactttgacccattacgtggaggtttcgattaccgtgttttttacctgaatttccgcgtaccgtgtcaaagtcttctgtttttacgtaggtgtcagctgatcgctagggtatttatacctcagggtttgtgtcaagaggccactcttgagtgccagcgagaagagttttctcctctgcgccggcagtttaataataaaaaaatgagagatttgcgatttctgcctcaggaaataatctctgctgagactggaaatgaaatattggagcttgtggtgcacgccctgatgggagacgatccggagccacctgtgcagctttttgagcctcctacgcttcaggaactgtatgatttagaggtagagggatcggaggattctaatgaggaagctgtaaatggcttttttaccgattctatgcttttagctgctaatgaagggttagaattagatccgcctttggacacttttgatactccaggggtaattgtggaaagcggtacaggtgtaagaaaattacctgatttgagttccgtggactgtgatttgcactgctatgaagacgggtttcctccgagtgatgaggaggaccatgaaaaggagcagtccatgcagactgcagcgggtgagggagtgaaggctgccaatgttggttttcagttggattgcccggagcttcctggacatggctgtaagtcttgtgaatttcacaggaaaaatactggagtaaaggaactgttatgttcgctttgttatatgagaacgcactgccactttatttacagtaagtgtgtttaagttaaaatttaaaggaatatgctgtttttcacatgtatattgagtgtgagttttgtgcttcttattataggtcctgtgtctgatgctgatgaatcaccatctcctgattctactacctcacctcctgagattcaagcacctgttcctgtggacgtgcgcaagcccattcctgtgaagcttaagcctgggaaacgtccagcagtggaaaaacttgaggacttgttacagggtggggacggacctttggacttgagtacacggaaacgtccaagacaataagtgttccatatccgtgtttacttaaggtgacgtcaatatttgtgtgacagtgcaatgtaataaaaatatgttaactgttcactggtttttattgctttttgggcggggactcaggtatataagtagaagcagacctgtgtggttagctcataggagctggctttcatccatggaggtttgggccattttggaagaccttaggaagactaggcaactgttagagaacgcttcggacggagtctccggtttttggagattctggttcgctagtgaattagctagggtagtttttaggataaaacaggactataaacaagaatttgaaaagttgttggtagattgcccaggactttttgaagctcttaatttgggccatcaggttcactttaaagaaaaagttttatcagttttagacttttcaaccccaggtagaactgctgctgctgtggcttttcttacttttatattagataaatggatcccgcagactcatttcagcaggggatacgttttggatttcatagccacagcattgtggagaacatggaaggttcgcaagatgaggacaatcttaggttactggccagtgcagcctttgggtgtagcgggaatcctgaggcatccaccggtcatgccagcggttctggaggaggaacagcaagaggacaacccgagagccggcctggaccctccagtggaggaggcggagtagctgacttgtctcctgaactgcaacgggtgcttactggatctacgtccactggacgggataggggcgttaagagggagagggcatctagtggtactgatgctagatctgagttggctttaagtttaatgagtcgcagacgtcctgaaaccatttggtggcatgaggttcagaaagagggaagggatgaagtttctgtattgcaggagaaatattcactggaacaggtgaaaacatgttggttggagcctgaggatgattgggaggtggccattaaaaattatgccaagatagctttgaggcctgataaacagtataagattactagacggattaatatccggaatgcttgttacatatctggaaatggggctgaggtggtaatagatactcaagacaaggcagttattagatgctgcatgatggatatgtggcctggggtagtcggtatggaagcagtaacttttgtaaatgttaagtttaggggagatggttataatggaatagtgtttatggccaataccaaacttatattgcatggttgtagcttttttggtttcaacaatacctgtgtagatgcctggggacaggttagtgtacggggatgtagtttctatgcgtgttggattgccacagctggcagaaccaagagtcaattgtctctgaagaaatgcatatttcaaagatgtaacctgggcattctgaatgaaggcgaagcaagggtccgccactgcgcttctacagatactggatgttttattttgattaagggaaatgccagcgtaaagcataacatgatttgcggtgcttccgatgagaggccttatcaaatgctcacttgtgctggtgggcattgtaatatgctggctactgtgcatattgtttcccatcaacgcaaaaaatggcctgtttttgatcacaatgtgatgacgaagtgtaccatgcatgcaggtgggcgtagaggaatgtttatgccttaccagtgtaacatgaatcatgtgaaagtgttgttggaaccagatgccttttccagaatgagcctaacaggaatttttgacatgaacatgcaaatctggaagatcctgaggtatgatgatacgagatcgagggtacgcgcatgcgaatgcggaggcaagcatgccaggttccagccggtgtgtgtagatgtgactgaagatctcagaccggatcatttggttattgcccgcactggagcagagttcggatccagtggagaagaaactgactaaggtgagtattgggaaaactttggggtgggattttcagatggacagattgagtaaaaatttgttttttctgtcttgcagctgtcatgagtggaaacgcttcttttaaggggggagtcttcagcccttatctgacagggcgtctcccatcctgggcaggagttcgtcagaatgttatgggatctactgtggatggaagacccgtccaacccgccaattcttcaacgctgacctatgctactttaagttcttcacctttggacgcagctgcagctgccgccgccgcttctgttgccgctaacactgtgcttggaatgggttactatggaagcatcatggctaattccacttcctctaataacccttctaccctgactcaggacaagttacttgtccttttggcccagctggaggctttgacccaacgtctgggtgaactttctcagcaggtggtcgagttgcgagtacaaactgagtctgctgtcggcacggcaaagtctaaataaaaaaatcccagaatcaatgaataaataaacaagcttgttgttgatttaaaatcaagtgtttttatttcatttttcgcgcacggtatgccctagaccaccgatctctatcattgagaactcggtggattttttccaggatcctatagaggtgggattgaatgtttagatacatgggcattaggccgtctttggggtggagatagctccattgaagggattcatgctccggggtagtgttgtaaatcacccagtcataacaaggtcgcagtgcatggtgttgcacaatatcttttagaagtaggctgattgccacagataagcccttggtgtaggtgtttacaaaccggttgagctgggatgggtgcattcggggtgaaattatgtgcattttggattggatttttaagttggcaatattgccgccaagatcccgtcttgggttcatgttatgaaggaccaccaagacggtgtatccggtacatttaggaaatttatcgtgcagcttggatggaaaagcgtggaaaaatttggagacacccttgtgtcctccaagattttccatgcactcatccatgataatagcaatggggccgtgggcagcggcgcgggcaaacacgttccgtgggtctgacacatcatagttatgttcctgagttaaatcatcataagccattttaatgaatttggggcggagagtaccagattggggtatgaatgttccttcgggccccggagcatagttcccctcacagatttgcatttcccaagctttcagttccgagggtggaatcatgtccacctggggggctatgaaaaacaccgtttctggggcgggggtgattaattgtgatgatagcaaatttctgagcaattgagatttgccacatccggtggggccataaatgattccgattacgggttgcaggtggtagtttagggaacggcaactgccgtcttctcgaagcaagggggccacctcgttcatcatttcccttacatgcatattttcccgcaccaaatccattaggaggcgctctcctcctagtgatagaagttcttgtagtgaggaaaagtttttcagcggtttcagaccgtcagccatgggcattttggagagagtttgctgcaaaagttctagtctgttccacagttcagtgatgtgttctatggcatctcgatccagcagacctcctcgtttcgcgggtttggacggctcctggaatagggtatgagacgatgggcgtccagcgctgccagggttcggtccttccagggtctcagtgttcgagtcagggttgtttccgtcacagtgaaggggtgtgcgcctgcttgggcgcttgccagggtgcgcttcagactcatcctgctggtcgaaaacttctgtcgcttggcgccctgtatgtcggccaagtagcagtttaccatgagttcgtagttgagcgcctcggctgcgtggcctttggcgcggagcttacctttggaagttttcttgcataccgggcagtataggcatttcagcgcatacaacttgggcgcaaggaaaacggattctggggagtatgcatctgcgccgcaggaggcgcaaacagtttcacattccaccagccaggttaaatccggttcattggggtcaaaaacaagttttccgccatattttttgatgcgtttcttacctttggtctccatgagttcgtgtcctcgttgagtgacaaacaggctgtccgtgtccccgtagactgattttacaggcctcttctccagtggagtgcctcggtcttcttcgtacaggaactctgaccactctgatacaaaggcgcgcgtccaggccagcacaaaggaggctatgtgggaggggtagcgatcgttgtcaaccagggggtccaccttttccaaagtatgcaaacacatgtcaccctcttcaacatccaggaatgtgattggcttgtaggtgtatttcacgtgacctggggtccccgctgggggggtataaaagggggcggttctttgctcttcctcactgtcttccggatcgctgtccaggaacgtcagctgttggggtaggtattccctctcgaaggcgggcatgacctctgcactcaggttgtcagtttctaagaacgaggaggatttgatattgacagtgccggttgagatgcctttcatgaggttttcgtccatctggtcagaaaacacaatttttttattgtcaagtttggtggcaaatgatccatacagggcgttggataaaagtttggcaatggatcgcatggtttggttcttttccttgtccgcgcgctctttggcggcgatgttgagttggacatactcgcgtgccaggcacttccattcggggaagatagttgttaattcatctggcacgattctcacttgccaccctcgattatgcaaggtaattaaatccacactggtggccacctcgcctcgaaggggttcattggtccaacagagcctacctcctttcctagaacagaaagggggaagtgggtctagcataagttcatcgggagggtctgcatccatggtaaagattcccggaagtaaatccttatcaaaatagctgatgggagtggggtcatctaaggccatttgccattctcgagctgccagtgcgcgctcatatgggttaaggggactgccccatggcatgggatgggtgagtgcagaggcatacatgccacagatgtcatagacgtagatgggatcctcaaagatgcctatgtaggttggatagcatcgcccccctctgatacttgctcgcacatagtcatatagttcatgtgatggcgctagcagccccggacccaagttggtgcgattgggtttttctgttctgtagacgatctggcgaaagatggcgtgagaattggaagagatggtgggtctttgaaaaatgttgaaatgggcatgaggtagacctacagagtctctgacaaagtgggcataagattcttgaagcttggttaccagttcggcggtgacaagtacgtctagggcgcagtagtcaagtgtttcttgaatgatgtcataacctggttggtttttcttttcccacagttcgcggttgagaaggtattcttcgcgatccttccagtactcttctagcggaaacccgtctttgtctgcacggtaagatcctagcatgtagaactgattaactgccttgtaagggcagcagcccttctctacgggtagagagtatgcttgagcagcttttcgtagcgaagcgtgagtaagggcaaaggtgtctctgaccatgactttgaggaattggtatttgaagtcgatgtcgtcacaggctccctgttcccagagttggaagtctacccgtttcttgtaggcggggttgggcaaagcgaaagtaacatcattgaagagaatcttgccggccctgggcatgaaattgcgagtgatgcgaaaaggctgtggtacttccgctcggttattgataacctgggcagctaggacgatctcgtcgaaaccgttgatgttgtgtcctacgatgtataattctatgaaacgcggcgtgcctctgacgtgaggtagcttactgagctcatcaaaggttaggtctgtggggtcagataaggcgtagtgttcgagagcccattcgtgcaggtgaggattcgctttaaggaaggaggaccagaggtccactgccagtgctgtttgtaactggtcccggtactgacgaaaatgccgtccgactgccattttttctggggtgacgcaatagaaggtttgggggtcctgccgccagcgatcccacttgagttttatggcgaggtcataggcgatgttgacgagccgctggtctccagagagtttcatgaccagcatgaaggggattagctgcttgccaaaggaccccatccaggtgtaggtttccacatcgtaggtgagaaagagcctttctgtgcgaggatgagagccaatcgggaagaactggatctcctgccaccagttggaggaatggctgttgatgtgatggaagtagaactccctgcgacgcgccgagcattcatgcttgtgcttgtacagacggccgcagtagtcgcagcgttgcacgggttgtatctcgtgaatgagttgtacctggcttcccttgacgagaaatttcagtgggaagccgaggcctggcgattgtatctcgtgctttactatgttgtctgcatcggcctgttcatcttctgtctcgatggtggtcatgctgacgagccctcgcgggaggcaagtccagacctcggcgcggcaggggcggagctcgaggacgagagcgcgcaggctggagctgtccagggtcctgagacgctgcggactcaggttagtaggcagtgtcaggagattaacttgcatgatcttttggagggcgtgcgggaggttcagatagtacttgatctcaacgggtccgttggtggagatgtcgatggcttgcagggttccgtgtcccttgggcgctaccaccgtgcccttgtttttcattttggacggcggtggctctgttgcttcttgcatgtttagaagcggtgtcgagggcgcgcaccgggcggcaggggcggctcgggacccggcggcatggctggcagtggtacgtcggcgccgcgcgcgggtaggttctggtactgcgccctgagaagactcgcatgcgcgacgacgcggcggttgacatcctggatctgacgcctctgggtgaaagctaccggccccgtgagcttgaacctgaaagagagttcaacagaatcaatctcggtatcgttgacggcggcttgcctaaggatttcttgcacgtcaccagagttgtcctggtaggcgatctccgccatgaactgctcgatctcttcctcttgaagatctccgcggcccgctctctcgacggtggccgcgaggtcgttggagatgcgcccaatgagttgagagaatgcattcatgcccgcctcgttccagacgcggctgtagaccacggcccccacgggatctctcgcgcgcatgaccacctgggcgaggttgagctccacgtggcgggtgaagaccgcatagttgcataggcgctggaaaaggtagttgagtgtggtggcgatgtgctcggtgacgaagaaatacatgatccatcgtctcagcggcatctcgctgacatcgcccagagcttccaagcgctccatggcctcgtagaagtccacggcaaaattaaaaaactgggagtttcgcgcggacacggtcaactcctcttccagaagacggataagttcggcgatggtggtgcgcacctcgcgctcgaaagcccctgggatttcttcctcaatctcttcttcttccactaacatctcttcctcttcaggtggggctgcaggaggagggggaacgcggcgacgccggcggcgcacgggcagacggtcgatgaatctttcaatgacctctccgcggcggcggcgcatggtttcagtgacggcgcggccgttctcgcgcggtcgcagagtaaaaacaccgccgcgcatctccttaaagtggtgactgggaggttctccgtttgggagggagagggcgctgattatacattttattaattggcccgtagggactgcacgcagagatctgatcgtgtcaagatccacgggatctgaaaacctttcgacgaaagcgtctaaccagtcacagtcacaaggtaggctgagtacggcttcttgtgggcgggggtggttatgtgttcggtctgggtcttctgtttcttcttcatctcgggaaggtgagacgatgctgctggtgatgaaattaaagtaggcagttctaagacggcggatggtggcgaggagcaccaggtctttgggtccggcttgctggatacgcaggcgattggccattccccaagcattatcctgacatctagcaagatctttgtagtagtcttgcatgagccgttctacgggcacttcttcctcacccgttctgccatgcatacgtgtgagtccaaatccgcgcattggttgtaccagtgccaagtcagctacgactctttcggcgaggatggcttgctgtacttgggtaagggtggcttgaaagtcatcaaaatccacaaagcggtggtaagctcctgtattaatggtgtaagcacagttggccatgactgaccagttaactgtctggtgaccagggcgcacgagctcggtgtatttaaggcgcgaataggcgcgggtgtcaaagatgtaatcgttgcaggtgcgcaccagatactggtaccctataagaaaatgcggcggtggttggcggtagagaggccatcgttctgtagctggagcgccaggggcgaggtcttccaacataaggcggtgatagccgtagatgtacctggacatccaggtgattcctgcggcggtagtagaagcccgaggaaactcgcgtacgcggttccaaatgttgcgtagcggcatgaagtagttcattgtaggcacggtttgaccagtgaggcgcgcgcagtcattgatgctctatagacacggagaaaatgaaagcgttcagcgactcgactccgtagcctggaggaacgtgaacgggttgggtcgcggtgtaccccggttcgagacttgtactcgagccggccggagccgcggctaacgtggtattggcactcccgtctcgacccagcctacaaaaatccaggatacggaatcgagtcgttttgctggtttccgaatggcagggaagtgagtcctattttttttttttgccgctcagatgcatcccgtgctgcgacagatgcgcccccaacaacagcccccctcgcagcagcagcagcagcaatcacaaaaggctgtccctgcaactactgcaactgccgccgtgagcggtgcgggacagcccgcctatgatctggacttggaagagggcgaaggactggcacgtctaggtgcgccttcacccgagcggcatccgcgagttcaactgaaaaaagattctcgcgaggcgtatgtgccccaacagaacctatttagagacagaagcggcgaggagccggaggagatgcgagcttcccgctttaacgcgggtcgtgagctgcgtcacggtttggaccgaagacgagtgttgcgggacgaggatttcgaagttgatgaaatgacagggatcagtcctgccagggcacacgtggctgcagccaaccttgtatcggcttacgagcagacagtaaaggaagagcgtaacttccaaaagtcttttaataatcatgtgcgaaccctgattgcccgcgaagaagttacccttggtttgatgcatttgtgggatttgatggaagctatcattcagaaccctactagcaaacctctgaccgcccagctgtttctggtggtgcaacacagcagagacaatgaggctttcagagaggcgctgctgaacatcaccgaacccgaggggagatggttgtatgatcttatcaacattctacagagtatcatagtgcaggagcggagcctgggcctggccgagaaggtggctgccatcaattactcggttttgagcttgggaaaatattacgctcgcaaaatctacaagactccatacgttcccatagacaaggaggtgaagatagatgggttctacatgcgcatgacgctcaaggtcttgaccctgagcgatgatcttggggtgtatcgcaatgacagaatgcatcgcgcggttagcgccagcaggaggcgcgagttaagcgacagggaactgatgcacagtttgcaaagagctctgactggagctggaaccgagggtgagaattacttcgacatgggagctgacttgcagtggcagcctagtcgcagggctctgagcgccgcgacggcaggatgtgagcttccttacatagaagaggcggatgaaggcgaggaggaagagggcgagtacttggaagactgatggcacaacccgtgttttttgctagatggaacagcaagcaccggatcccgcaatgcgggcggcgctgcagagccagccgtccggcattaactcctcggacgattggacccaggccatgcaacgtatcatggcgttgacgactcgcaaccccgaagcctttagacagcaaccccaggccaaccgtctatcggccatcatggaagctgtagtgccttcccgctctaatcccactcatgagaaggtcctggccatcgtgaacgcgttggtggagaacaaagctattcgtccagatgaggccggactggtatacaacgctctcttagaacgcgtggctcgctacaacagtagcaatgtgcaaaccaatttggaccgtatgataacagatgtacgcgaagccgtgtctcagcgcgaaaggttccagcgtgatgccaacctgggttcgctggtggcgttaaatgctttcttgagtactcagcctgctaatgtgccgcgtggtcaacaggattatactaactttttaagtgctttgagactgatggtatcagaagtacctcagagcgaagtgtatcagtccggtcctgattacttctttcagactagcagacagggcttgcagacggtaaatctgagccaagcttttaaaaaccttaaaggtttgtggggagtgcatgccccggtaggagaaagagcaaccgtgtctagcttgttaactccgaactcccgcctattattactgttggtagctcctttcaccgacagcggtagcatcgaccgtaattcctatttgggttacctactaaacctgtatcgcgaagccatagggcaaagtcaggtggacgagcagacctatcaagaaattacccaagtcagtcgcgctttgggacaggaagacactggcagtttggaagccactctgaacttcttgcttaccaatcggtctcaaaagatccctcctcaatatgctcttactgcggaggaggagaggatccttagatatgtgcagcagagcgtgggattgtttctgatgcaagagggggcaactccgactgcagcactggacatgacagcgcgaaatatggagcccagcatgtatgccagtaaccgacctttcattaacaaactgctggactacttgcacagagctgccgctatgaactctgattatttcaccaatgccatcttaaacccgcactggctgcccccacctggtttctacacgggcgaatatgacatgcccgaccctaatgacggatttctgtgggacgacgtggacagcgatgttttttcacctctttctgatcatcgcacgtggaaaaaggaaggcggcgatagaatgcattcttctgcatcgctgtccggggtcatgggtgctaccgcggctgagcccgagtctgcaagtccttttcctagtctacccttttctctacacagtgtacgtagcagcgaagtgggtagaataagtcgcccgagtttaatgggcgaagaggagtatctaaacgattccttgctcagaccggcaagagaaaaaaatttcccaaacaatggaatagaaagtttggtggataaaatgagtagatggaagacttatgctcaggatcacagagacgagcctgggatcatggggattacaagtagagcgagccgtagacgccagcgccatgacagacagaggggtcttgtgtgggacgatgaggattcggccgatgatagcagcgtgctggacttgggtgggagaggaaggggcaacccgtttgctcatttgcgccctcgcttgggtggtatgttgtaaaaaaaaataaaaaaaaaactcaccaaggccatggcgacgagcgtacgttcgttcttctttattatctgtgtctagtataatgaggcgagtcgtgctaggcggagcggtggtgtatccggagggtcctcctccttcgtacgagagcgtgatgcagcagcagcaggcgacggcggtgatgcaatccccactggaggctccctttgtgcctccgcgatacctggcacctacggagggcagaaacagcattcgttattcggaactggcacctcagtacgataccaccaggttgtatctggtggacaacaagtcggcggacattgcttctctgaactatcagaatgaccacagcaacttcttgaccacggtggtgcaaaacaatgactttacccctacggaagccagcacccagaccattaactttgatgaacgatcgcggtggggcggtcagctaaagaccatcatgcatactaacatgccaaacgtgaacgagtatatgtttagtaacaagttcaaagcgcgtgtgatggtgtccagaaaacctcccgacggtgctgcagttggggatacttatgatcacaagcaggatattttgaaatatgagtggttcgagtttactttgccagaaggcaacttttcagttactatgactattgatttgatgaacaatgccatcatagataattacttgaaagtgggtagacagaatggagtgcttgaaagtgacattggtgttaagttcgacaccaggaacttcaagctgggatgggatcccgaaaccaagttgatcatgcctggagtgtatacgtatgaagccttccatcctgacattgtcttactgcctggctgcggagtggattttaccgagagtcgtttgagcaaccttcttggtatcagaaaaaaacagccatttcaagagggttttaagattttgtatgaagatttagaaggtggtaatattccggccctcttggatgtagatgcctatgagaacagtaagaaagaacaaaaagccaaaatagaagctgctacagctgctgcagaagctaaggcaaacatagttgccagcgactctacaagggttgctaacgctggagaggtcagaggagacaattttgcgccaacacctgttccgactgcagaatcattattggccgatgtgtctgaaggaacggacgtgaaactcactattcaacctgtagaaaaagatagtaagaatagaagctataatgtgttggaagacaaaatcaacacagcctatcgcagttggtatctttcgtacaattatggcgatcccgaaaaaggagtgcgttcctggacattgctcaccacctcagatgtcacctgcggagcagagcaggtctactggtcgcttccagacatgatgaaggatcctgtcactttccgctccactagacaagtcagtaactaccctgtggtgggtgcagagcttatgcccgtcttctcaaagagcttctacaacgaacaagctgtgtactcccagcagctccgccagtccacctcgcttacgcacgtcttcaaccgctttcctgagaaccagattttaatccgtccgccggcgcccaccattaccaccgtcagtgaaaacgttcctgctctcacagatcacgggaccctgccgttgcgcagcagtatccggggagtccaacgtgtgaccgttactgacgccagacgccgcacctgtccctacgtgtacaaggcactgggcatagtcgcaccgcgcgtcctttcaagccgcactttctaaaaaaaaaaaaaatgtccattcttatctcgcccagtaataacaccggttggggtctgcgcgctccaagcaagatgtacggaggcgcacgcaaacgttctacccaacatcctgtccgtgttcgcggacattttcgcgctccatggggcgccctcaagggccgcactcgcgttcgaaccaccgtcgatgatgtaatcgatcaggtggttgccgacgcccgtaattatactcctactgcgcctacatctactgtggatgcagttattgacagtgtagtggctgacgctcgcaactatgctcgacgtaagagccggcgaaggcgcattgccagacgccaccgagctaccactgccatgcgagccgcaagagctctgctacgaagagctagacgcgtggggcgaagagccatgcttagggcggccagacgtgcagcttcgggcgccagcgccggcaggtcccgcaggcaagcagccgctgtcgcagcggcgactattgccgacatggcccaatcgcgaagaggcaatgtatactgggtgcgtgacgctgccaccggtcaacgtgtacccgtgcgcacccgtccccctcgcacttagaagatactgagcagtctccgatgttgtgtcccagcggcgaggatgtccaagcgcaaatacaaggaagaaatgctgcaggttatcgcacctgaagtctacggccaaccgttgaaggatgaaaaaaaaccccgcaaaatcaagcgggttaaaaaggacaaaaaagaagaggaagatggcgatgatgggctggcggagtttgtgcgcgagtttgccccacggcgacgcgtgcaatggcgtgggcgcaaagttcgacatgtgttgagacctggaacttcggtggtctttacacccggcgagcgttcaagcgctacttttaagcgttcctatgatgaggtgtacggggatgatgatattcttgagcaggcggctgaccgattaggcgagtttgcttatggcaagcgtagtagaataacttccaaggatgagacagtgtcgatacccttggatcatggaaatcccacccctagtcttaaaccggtcactttgcagcaagtgttacccgtaactccgcgaacaggtgttaaacgcgaaggtgaagatttgtatcccactatgcaactgatggtacccaaacgccagaagttggaggacgttttggagaaagtaaaagtggatccagatattcaacctgaggttaaagtgagacccattaagcaggtagcgcctggtctgggggtacaaactgtagacattaagattcccactgaaagtatggaagtgcaaactgaacccgcaaagcctactgccacctccactgaagtgcaaacggatccatggatgcccatgcctattacaactgacgccgccggtcccactcgaagatcccgacgaaagtacggtccagcaagtctgttgatgcccaattatgttgtacacccatctattattcctactcctggttaccgaggcactcgctactatcgcagccgaaacagtacctcccgccgtcgccgcaagacacctgcaaatcgcagtcgtcgccgtagacgcacaagcaaaccgactcccggcgccctggtgcggcaagtgtaccgcaatggtagtgcggaacctttgacactgccgcgtgcgcgttaccatccgagtatcatcacttaatcaatgttgccgctgcctccttgcagatatggccctcacttgtcgccttcgcgttcccatcactggttaccgaggaagaaactcgcgccgtagaagagggatgttgggacgcggaatgcgacgctacaggcgacggcgtgctatccgcaagcaattgcggggtggttttttaccagccttaattccaattatcgctgctgcaattggcgcgataccaggcatagcttccgtggcggttcaggcctcgcaacgacattgacattggaaaaaaacgtataaataaaaaaaaaaaaatacaatggactctgacactcctggtcctgtgactatgttttcttagagatggaagacatcaatttttcatccttggctccgcgacacggcacgaagccgtacatgggcacctggagcgacatcggcacgagccaactgaacgggggcgccttcaattggagcagtatctggagcgggcttaaaaattttggctcaaccataaaaacatacgggaacaaagcttggaacagcagtacaggacaggcgcttagaaataaacttaaagaccagaacttccaacaaaaagtagtcgatgggatagcttccggcatcaatggagtggtagatttggctaaccaggctgtgcagaaaaagataaacagtcgtttggacccgccgccagcaaccccaggtgaaatgcaagtggaggaagaaattcctccgccagaaaaacgaggcgacaagcgtccgcgtcccgatttggaagagacgctggtgacgcgcgtagatgaaccgccttcttatgaggaagcaacgaagcttggaatgcccaccactagaccgatagccccaatggccaccggggtgatgaaaccttctcagttgcatcgacccgtcaccttggatttgccccctccccctgctgctactgctgtacccgcttctaagcctgtcgctgccccgaaaccagtcgccgtagccaggtcacgtcccgggggcgctcctcgtccaaatgcgcactggcaaaatactctgaacagcatcgtgggtctaggcgtgcaaagtgtaaaacgccgtcgctgcttttaattaaatatggagtagcgcttaacttgcctatctgtgtatatgtgtcattacacgccgtcacagcagcagaggaaaaaaggaagaggtcgtgcgtcgacgctgagttactttcaagatggccaccccatcgatgctgccccaatgggcatacatgcacatcgccggacaggatgcttcggagtacctgagtccgggtctggtgcagttcgcccgcgccacagacacctacttcaatctgggaaataagtttagaaatcccaccgtagcgccgacccacgatgtgaccaccgaccgtagccagcggctcatgttgcgcttcgtgcccgttgaccgggaggacaatacatactcttacaaagtgcggtacaccctggccgtgggcgacaacagagtgctggatatggccagcacgttctttgacattaggggtgtgttggacagaggtcccagtttcaaaccctattctggtacggcttacaactccctggctcctaaaggcgctccaaatacatctcagtggattgcagaaggtgtaaaaaatacaactggtgaggaacacgtaacagaagaggaaaccaatactactacttacacttttggcaatgctcctgtaaaagctgaagctgaaattacaaaagaaggactcccagtaggtttggaagtttcagatgaagaaagtaaaccgatttatgctgataaaacatatcagccagaacctcagctgggagatgaaacttggactgaccttgatggaaaaaccgaaaagtatggaggcagggctctcaaacccgatactaagatgaaaccatgctacgggtcctttgccaaacctactaatgtgaaaggcggtcaggcaaaacaaaaaacaacggagcagccaaatcagaaagtcgaatatgatatcgacatggagttttttgatgcggcatcgcagaaaacaaacttaagtcctaaaattgtcatgtatgcagaaaatgtaaatttggaaactccagacactcatgtagtgtacaaacctggaacagaagacacaagttccgaagctaatttgggacaacaatctatgcccaacagacccaactacattggcttcagagataactttattggacttatgtactataacagtactggtaacatgggggtgctggctggtcaagcgtctcagttaaatgcagtggttgacttgcaggacagaaacacagaactttcttaccaactcttgcttgactctctgggcgacagaaccagatactttagcatgtggaatcaggctgtggacagttatgatcctgatgtacgtgttattgaaaatcatggtgtggaagatgaacttcccaactactgttttccactggacggcataggtgttccaacaaccagttacaaatcaatagttccaaatggagacaatgcgcctaattggaaggaacctgaagtaaatggaacaagtgagatcggacagggtaatttgtttgccatggaaattaaccttcaagccaatctatggcgaagtttcctttattccaatgtggctctatatctcccagactcgtacaaatacaccccgtccaatgtcactcttccagaaaacaaaaacacctacgactacatgaacgggcgggtggtgccgccatctctagtagacacctatgtgaacattggtgccaggtggtctctggatgccatggacaatgtcaacccattcaaccaccaccgtaacgctggcttgcgttaccgatccatgcttctgggtaacggacgttatgtgcctttccacatacaagtgcctcaaaaattcttcgctgttaaaaacctgctgcttctcccaggctcctacacttatgagtggaactttaggaaggatgtgaacatggttctacagagttccctcggtaacgacctgcgggtagatggcgccagcatcagtttcacgagcatcaacctctatgctacttttttccccatggctcacaacaccgcttccacccttgaagccatgctgcggaatgacaccaatgatcagtcattcaacgactacctatctgcagctaacatgctctaccccattcctgccaatgcaaccaatattcccatttccattccttctcgcaactgggcggctttcagaggctggtcatttaccagactgaaaaccaaagaaactccctctttggggtctggatttgacccctactttgtctattctggttctattccctacctggatggtaccttctacctgaaccacacttttaagaaggtttccatcatgtttgactcttcagtgagctggcctggaaatgacaggttactatctcctaacgaatttgaaataaagcgcactgtggatggcgaaggctacaacgtagcccaatgcaacatgaccaaagactggttcttggtacagatgctcgccaactacaacatcggctatcagggcttctacattccagaaggatacaaagatcgcatgtattcatttttcagaaacttccagcccatgagcaggcaggtggttgatgaggtcaattacaaagacttcaaggccgtcgccataccctaccaacacaacaactctggctttgtgggttacatggctccgaccatgcgccaaggtcaaccctatcccgctaactatccctatccactcattggaacaactgccgtaaatagtgttacgcagaaaaagttcttgtgtgacagaaccatgtggcgcataccgttctcgagcaacttcatgtctatgggggcccttacagacttgggacagaatatgctctatgccaactcagctcatgctctggacatgacctttgaggtggatcccatggatgagcccaccctgctttatcttctcttcgaagttttcgacgtggtcagagtgcatcagccacaccgcggcatcatcgaggcagtctacctgcgtacaccgttctcggccggtaacgctaccacgtaagaagcttcttgcttcttgcaaatagcagctgcaaccatggcctgcggatcccaaaacggctccagcgagcaagagctcagagccattgtccaagacctgggttgcggaccctattttttgggaacctacgataagcgcttcccggggttcatggcccccgataagctcgcctgtgccattgtaaatacggccggacgtgagacggggggagagcactggttggctttcggttggaacccacgttctaacacctgctacctttttgatccttttggattctcggatgatcgtctcaaacagatttaccagtttgaatatgagggtctcctgcgccgcagcgctcttgctaccaaggaccgctgtattacgctggaaaaatctacccagaccgtgcagggtccccgttctgccgcctgcggacttttctgctgcatgttccttcacgcctttgtgcactggcctgaccgtcccatggacggaaaccccaccatgaaattgctaactggagtgccaaacaacatgcttcattctcctaaagtccagcccaccctgtgtgacaatcaaaaagcactctaccattttcttaatacccattcgccttattttcgctcccatcgtacacacatcgaaagggccactgcgttcgaccgtatggatgttcaataatgactcatgtaaacaacgtgttcaataaacatcactttatttttttacatgtatcaaggctctgcattacttatttatttacaagtcgaatgggttctgacgagaatcagaatgacccgcaggcagtgatacgttgcggaactgatacttgggttgccacttgaattcgggaatcaccaacttgggaaccggtatatcgggcaggatgtcactccacagctttctggtcagctgcaaagctccaagcaggtcaggagccgaaatcttgaaatcacaattaggaccagtgctttgagcgcgagagttgcggtacaccggattgcagcactgaaacaccatcagcgacggatgtctcacgcttgccagcacggtgggatctgcaatcatgcccacatccagatcttcagcattggcaatgctgaacggggtcatcttgcaggtctgcctacccatggcgggcacccaattaggcttgtggttgcaatcgcagtgcagggggatcagtatcatcttggcctgatcctgtctgattcctggatacacggctctcatgaaagcatcatattgcttgaaagcctgctgggctttactaccctcggtataaaacatcccgcaggacctgctcgaaaactggttagctgcacagccggcatcattcacacagcagcgggcgtcattgttagctatttgcaccacacttctgccccagcggttttgggtgattttggttcgctcgggattctcctttaaggctcgttgtccgttctcgctggccacatccatctcgataatctgctccttctgaatcataatattgccatgcaggcacttcagcttgccctcataatcattgcagccatgaggccacaacgcacagcctgtacattcccaattatggtgggcgatctgagaaaaagaatgtatcattccctgcagaaatcttcccatcatcgtgctcagtgtcttgtgactagtgaaagttaactggatgcctcggtgctcctcgtttacgtactggtgacagatgcgcttgtattgttcgtgttgctcaggcattagtttaaaagaggttctaagttcgttatccagcctgtacttctccatcagcagacacatcacttccatgcctttctcccaagcagacaccaggggcaagctaatcggattcttaacagtgcaggcagcagctcctttagccagagggtcatctttagcgatcttctcaatgcttcttttgccatccttctcaacgatgcgcacgggcgggtagctgaaacccactgctacaagttgcgcctcttctctttcttcttcgctgtcttgactgatgtcttgcatggggatatgtttggtcttccttggcttctttttggggggtatcggaggaggaggactgtcgctccgttccggagacagggaggattgtgacgtttcgctcaccattaccaactgactgtcggtagaagaacctgaccccacacggcgacaggtgtttctcttcgggggcagaggtggaggcgattgcgaagggctgcggtccgacctggaaggcggatgactggcagaaccccttccgcgttcgggggtgtgctccctgtggcggtcgcttaactgatttccttcgcggctggccattgtgttctcctaggcagagaaacaacagacatggaaactcagccattgctgtcaacatcgccacgagtgccatcacatctcgtcctcagcgacgaggaaaaggagcagagcttaagcattccaccgcccagtcctgccaccacctctaccctagaagataaggaggtcgacgcatctcatgacatgcagaataaaaaagcgaaagagtctgagacagacatcgagcaagacccgggctatgtgacaccggtggaacacgaggaagagttgaaacgctttctagagagagaggatgaaaactgcccaaaacaacgagcagataactatcaccaagatgctggaaatagggatcagaacaccgactacctcatagggcttgacggggaagacgcgctccttaaacatctagcaagacagtcgctcatagtcaaggatgcattattggacagaactgaagtgcccatcagtgtggaagagctcagccgcgcctacgagcttaacctcttttcacctcgtactccccccaaacgtcagccaaacggcacctgcgagccaaatcctcgcttaaacttttatccagcttttgctgtgccagaagtactggctacctatcacatcttttttaaaaatcaaaaaattccagtctcctgccgcgctaatcgcacccgcgccgatgccctactcaatctgggacctggttcacgcttacctgatatagcttccttggaagaggttccaaagatcttcgagggtctgggcaataatgagactcgggccgcaaatgctctgcaaaagggagaaaatggcatggatgagcatcacagcgttctggtggaattggaaggcgataatgccagactcgcagtactcaagcgaagcatcgaggtcacacacttcgcatatcccgctgtcaacctgccccctaaagtcatgacggcggtcatggaccagttactcattaagcgcgcaagtcccctttcagaagacatgcatgacccagatgcctgtgatgagggtaaaccagtggtcagtgatgagcagctaacccgatggctgggcaccgactctcccagggatttggaagagcgtcgcaagcttatgatggccgtggtgctggttaccgtagaactagagtgtctccgacgtttctttaccgattcagaaaccttgcgcaaactcgaagagaatctgcactacacttttagacacggctttgtgcggcaggcatgcaagatatctaacgtggaactcaccaacctggtttcctacatgggtattctgcatgagaatcgcctaggacaaagcgtgctgcacagcaccctgaagggggaagcccgccgtgattacatccgcgattgtgtctatctgtacctgtgccacacgtggcaaaccggcatgggtgtatggcagcaatgtttagaagaacagaacttgaaagagcttgacaagctcttacagaaatctcttaaggttctgtggacagggttcgacgagcgcaccgtcgcttccgacctggcagacctcatcttcccagagcgtctcagggttactttgcgaaacggattgcctgactttatgagccagagcatgcttaacaattttcgctctttcatcctggaacgctccggtatcctgcccgccacctgctgcgcactgccctccgactttgtgcctctcacctaccgcgagtgccccccgccgctatggagtcactgctacctgttccgtctggccaactatctctcctaccactcggatgtgatcgaggatgtgagcggagacggcttgctggagtgtcactgccgctgcaatctgtgcacgccccaccggtccctagcttgcaacccccagttgatgagcgaaacccagataataggcacctttgaattgcaaggccccagcagccaaggcgatgggtcttctcctgggcaaagtttaaaactgaccccgggactgtggacctccgcctacttgcgcaagtttgctccggaagattaccacccctatgaaatcaagttctatgaggaccaatcacagcctccaaaggccgaactttcggcctgcgtcatcacccagggggcaattctggcccaattgcaagccatccaaaaatcccgccaagaatttctactgaaaaagggtaagggggtctaccttgacccccagaccggcgaggaactcaacacaaggttccctcaggatgtcccaacgacgagaaaacaagaagttgaaggtgcagccgccgcccccagaagatatggaggaagattgggacagtcaggcagaggaggcggaggaggacagtctggaggacagtctggaggaagacagtttggaggaggaaaacgaggaggcagaggaggtggaagaagtaaccgccgacaaacagttatcctcggctgcggagacaagcaacagcgctaccatctccgctccgagtcgaggaacccggcggcgtcccagcagtagatgggacgagaccggacgcttcccgaacccaaccagcgcttccaagaccggtaagaaggatcggcagggatacaagtcctggcgggggcataagaatgccatcatctcctgcttgcatgagtgcgggggcaacatatccttcacgcggcgctacttgctattccaccatggggtgaactttccgcgcaatgttttgcattactaccgtcacctccacagcccctactatagccagcaaatcccggcagtctcgacagataaagacagcggcggcgacctccaacagaaaaccagcagcggcagttagaaaatacacaacaagtgcagcaacaggaggattaaagattacagccaacgagccagcgcaaacccgagagttaagaaatcggatctttccaaccctgtatgccatcttccagcagagtcggggtcaagagcaggaactgaaaataaaaaaccgatctctgcgttcgctcaccagaagttgtttgtatcacaagagcgaagatcaacttcagcgcactctcgaggacgccgaggctctcttcaacaagtactgcgcgctgactcttaaagagtaggcagcgaccgcgcttattcaaaaaaggcgggaattacatcatcctcgacatgagtaaagaaattcccacgccttacatgtggagttatcaaccccaaatgggattggcggcaggcgcctcccaggactactccacccgcatgaattggctcagcgccgggccttctatgatttctcgagttaatgatatacgcgcctaccgaaaccaaatacttttggaacagtcagctcttaccaccacgccccgccaacaccttaatcccagaaattggcccgccgccctagtgtaccaggaaagtcccgctcccaccactgtattacttcctcgagacgcccaggccgaagtccaaatgactaatgcaggtgcgcagttagctggcggctccaccctatgtcgtcacaggcctcggcataatataaaacgcctgatgatcagaggccgaggtatccagctcaacgacgagtcggtgagctctccgcttggtctacgaccagacggaatctttcagattgccggctgcgggagatcttccttcacccctcgtcaggctgttctgactttggaaagttcgtcttcgcaaccccgctcgggcggaatcgggaccgttcaatttgtggaggagtttactccctctgtctacttcaaccccttctccggatctcctgggcattacccggacgagttcataccgaacttcgacgcgattagcgagtcagtggacggctacgattgatgtctggtgacgcggctgagctatctcggctgcgacatctagaccactgccgccgctttcgctgctttgcccgggaactcattgagttcatctacttcgaactccccaaggatcaccctcaaggtccggcccacggagtgcggatttctatcgaaggcaaaatagactctcgcctgcaacgaattttctcccagcggcccgtgctgatcgagcgagaccagggaaacaccacggtttccatctactgcatttgtaatcaccccggattgcatgaaagcctttgctgtcttatgtgtactgagtttaataaaaactgaattaagactctcctacggactgccgcttcttcaacccggattttacaaccagaagaacgaaacttttcctgtcgtccaggactctgttaacttcacctttcctactcacaaactagaagctcaacgactacaccgcttttccagaagcattttccctactaatactactttcaaaaccggaggtgagctccaaggtcttcctacagaaaacccttgggtggaagcgggccttgtagtgctaggaattcttgcgggtgggcttgtgattattctttgctacctatacacaccttgcttcactttcttagtggtgttgtggtattggtttaaaaaatggggcccatactagtcttgcttgttttactttcgcttttggaaccgggttctgccaattacgatccatgtctagacttcgacccagaaaactgcacacttacttttgcacccgacacaagccgcatctgtggagttcatcgcctctcttacgaacttggcccccaacgacaaaaatttacctgcatggtgggaatcaaccccatagttatcacccagcaaagtggagatactaagggttgcattcactgctcctgcgattccatcgagtgcacctacaccctgctgaagaccctatgcggcctaagagacctgctaccaatgaattaaaaaatgattaataaaaaatcacttacttgaaatcagcaataaggtctctgttgaaattttctcccagcagcacctcacttccctcttcccaactctggtattctaaaccccgttcagcggcatactttctccatactttaaaggggatgtcaaattttagctcctctcctgtacccacaatcttcatgtctttcttcccagatgaccaagagagtccggctcagtgactccttcaaccctgtctacccctatgaagatgaaagcacctcccaacacccctttataaacccagggtttatttccccaaatggcttcacacaaagcccaaacggagttcttactttaaaatgtttaaccccactaacaaccacaggcggatctctacagctaaaagtgggagggggacttacagtggatgacaccaacggttttttgaaagaaaacataagtgccaccacaccactcgttaagactggtcactctataggtttaccactaggagccggattgggaacgaatgaaaataaactttgtatcaaattaggacaaggacttacattcaattcaaacaacatttgcattgatgacaatattaacaccttatggacaggagtcaaccccaccgaagccaactgtcaaatcatgaactccagtgaatctaatgattgcaaattaattctaacactagttaaaactggagcactagtcactgcatttgtttatgttataggagtatctaacaattttaatatgctaactacacacagaaatataaattttactgcagagctgtttttcgattctactggtaatttactaactagactctcatccctcaaaactccacttaatcataaatcaggacaaaacatggctactggtgccattactaatgctaaaggtttcatgcccagcacgactgcctatcctttcaatgataattctagagaaaaagaaaactacatttacggaacttgttactacacagctagtgatcgcactgcttttcccattgacatatctgtcatgcttaaccgaagagcaataaatgacgagacatcatattgtattcgtataacttggtcctggaacacaggagatgccccagaggtgcaaacctctgctacaaccctagtcacctccccatttaccttttactacatcagagaagacgactgacaaataaagtttgcgatcgccaggcccaccatgggatggagctgtatcatcctcttcttggtagcaacagctacaggtgtccactccgaggttcagctggtggagtctggcggtggcctggtgcagccagggggctcactccgtttgtcctgtgcagcttctggctataccttcaccaactatggtatgaactgggtccgtcaggccccgggtaagggcctggaatgggttggatggattaacacctataccggtgaaccgacctatgctgcggatttcaaacgtcgttttactttttctctggacacctccaagagcacagcttacctgcagatgaacagcctgcgcgctgaggacactgccgtctattactgtgcaaagtacccgcactattatgggagcagccactggtatttcgacgtctggggtcaaggaaccctggtcaccgtctcctcggcctccaccaagggcccatcggtcttccccctggcaccctcctccaagagcacctctgggggcacagcggccctgggctgcctggtcaaggactacttccccgaaccggtgacggtgtcgtggaactcaggcgccctgaccagcggcgtgcacaccttcccggctgtcctacagtcctcaggactctactccctcagcagcgtggtgaccgtgccctccagcagcttgggcacccagacctacatctgcaacgtgaatcacaagcccagcaacaccaaggtcgacaagaaagttgagcccaaatcttgtgacaaaactcacacatgcccaccgtgcccagcacctgagctcctggggggaccgtcagtcttcctcttccccccaaaacccaaggacaccctcatgatctcccggacccctgaggtcacatgcgtggtggtggacgtgagccacgaagaccctgaggtcaagttcaactggtacgtggacggcgtggaggtgcataatgccaagacaaagccgcgggaggagcagtacaacagcacgtaccgtgtggtcagcgtcctcaccgtcctgcaccaggactggctgaatggcaaggagtacaagtgcaaggtctccaacaaagccctcccagcccccatcgagaaaaccatctccaaagccaaagggcagccccgagaaccacaggtgtacaccctgcccccatcccgggaggagatgaccaagaaccaggtcagcctgacctgcctggtcaaaggcttctatcccagcgacatcgccgtggagtgggagagcaatgggcagccggagaacaactacaagaccacgcctcccgtgctggactccgacggctccttcttcctctacagcaagctcaccgtggacaagagcaggtggcagcaggggaacgtcttctcatgctccgtgatgcacgaggctctgcacaaccactacacgcagaagagcctctccctgtctccgggtaaatgatctagactcgaggtttctagaagttgtctcctcctgcactgactgactgacctaacgttactggccgaagccgcttggaataaggccggtgtgcgtttgtctatatgttattttccaccatattgccgtcttttggcaatgtgagggcccggaaacctggccctgtcttcttgacgagcattcctaggggtctttcccctctcgccaaaggaatgcaaggtctgttgaatgtcgtgaaggaagcagttcctctggaagcttcttgaagacaaacaacgtctgtagcgaccctttgcaggcagcggaaccccccacctggcgacaggtgcctctgcggccaaaagccacgtgtataagatacacctgcaaaggcggcacaaccccagtgccacgttgtgagttggatagttgtggaaagagtcaaatggctcccctcaagcgtattcaacaaggggctgaaggatgcccagaaggtaccccattgtatgggatctgatctggggcctcggtgcacatgcttttcatgtgtttagtcgaggttaaaaaacgtctaggccccccgaaccacggggacgtggttttcctttgaaaaacacgatgataataacatggactggacctggcgcgtgttttgcctgctcgccgtggctcctggggcccacagcgatatccagatgacccagtccccgagctccctgtccgcctctgtgggcgatagggtcaccatcacctgcagcgcaagtcaggatattagcaactatttaaactggtatcaacagaaaccaggaaaagctccgaaagtcctgatttacttcacctcctctctccactctggagtcccttctcgcttctctggatccggttctgggacggatttcactctgaccatcagcagtctgcagccagaagacttcgcaacttattactgtcaacagtatagcaccgtgccgtggacgtttggacagggtaccaaggtggagatcaaacgaactgtggctgcaccatctgtcttcatcttcccgccatctgatgagcagttgaaatctggaactgcttctgttgtgtgcctgctgaataacttctatcccagagaggccaaagtacagtggaaggtggataacgccctccaatcgggtaactcccaggagagtgtcacagagcaggacagcaaggacagcacctacagcctcagcagcaccctgacgctgagcaaagcagactacgagaaacacaaagtctacgcctgcgaagtcacccatcagggcctgagctcgcccgtcacaaagagcttcaacaggggagagtgttaagctagcttgactgactgagatacagcgtaccttcagctcacagacatgataagatacattgatgagtttggacaaaccacaactagaatgcagtgaaaaaaatgctttatttgtgaaatttgtgatgctattgctttatttgtaaccattataagctgcaataaacaagttaacaacaacaattgcattcattttatgtttcaggttcagggggaggtgtgggaggttttttaaagcaagtaaaacctctacaaatgtggtagtcgtcagctatcctgcaggaacttgtttatttgaaaatcaattcacaaaatccgagtagttattttgcctcccccttcccatttaacagaatacaccaatctctccccacgcacagctttaaacatttggataccattagatatagacatggttttagattccacattccaaacagtttcagagcgagccaatctggggtcagtgatagataaaaatccatcgggatagtcttttaaagcgctttcacagtccaactgctgcggatgcgactccggagtctggatcacggtcatctggaagaagaacgatgggaatcataatccgaaaacggtatcggacgattgtgtctcatcaaacccacaagcagccgctgtctgcgtcgctccgtgcgactgctgtttatgggatcagggtccacagtgtcctgaagcatgattttaatagcccttaacatcaactttctggtgcgatgcgcgcagcaacgcattctgatttcactcaaatctttgcagtaggtacaacacattattacaatattgtttaataaaccataattaaaagcgctccagccaaaactcatatctgatataatcgcccctgcatgaccatcataccaaagtttaatataaattaaatgacgttccctcaaaaacacactacccacatacatgatctcttttggcatgtgcatattaacaatctgtctgtaccatggacaacgttggttaatcatgcaacccaatataaccttccggaaccacactgccaacaccgctcccccagccatgcattgaagtgaaccctgctgattacaatgacaatgaagaacccaattctctcgaccgtgaatcacttgagaatgaaaaatatctatagtggcacaacatagacataaatgcatgcatcttctcataatttttaactcctcaggatttagaaacatatcccagggaataggaagctcttgcagaacagtaaagctggcagaacaaggaagaccacgaacacaacttacactatgcatagtcatagtatcacaatctggcaacagcgggtggtcttcagtcatagaagctcgggtttcattttcctcacaacgtggtaactgggctctggtgtaagggtgatgtctggcgcatgatgtcgagcgtgcgcgcaaccttgtcataatggagttgcttcctgacattctcgtattttgtatagcaaaacgcggccctggcagaacacactcttcttcgccttctatcctgccgcttagcgtgttccgtgtgatagttcaagtacaaccacactcttaagttggtcaaaagaatgctggcttcagttgtaatcaaaactccatcgcatctaatcgttctgaggaaatcatccaagcaatgcaactggattgtgtttcaagcaggagaggagagggaagagacggaagaaccatgttaatttttattccaaacgatctcgcagtacttcaaattgtagatcgcgcagatggcatctctcgcccccactgtgttggtgaaaaagcacagctagatcaaaagaaatgcgattttcaaggtgctcaacggtggcttccagcaaagcctccacgcgcacatccaagaacaaaagaataccaaaagaaggagcattttctaactcctcaatcatcatattacattcctgcaccattcccagataattttcagctttccagccttgaattattcgtgtcagttcttgtggtaaatccaatccacacattacaaacaggtcccggagggcgccctccaccaccattcttaaacacaccctcataatgacaaaatatcttgctcctgtgtcacctgtagcgaattgagaatggcaacatcaattgacatgcccttggctctaagttcttctttaagttctagttgtaaaaactctctcatattatcaccaaactgcttagccagaagccccccgggaacaagagcaggggacgctacagtgcagtacaagcgcagacctccccaattggctccagcaaaaacaagattggaataagcatattgggaaccgccagtaatatcatcgaagttgctggaaatataatcaggcagagtttcttgtaaaaattgaataaaagaaaaatttgccaaaaaaacattcaaaacctctgggatgcaaatgcaataggttaccgcgctgcgctccaacattgttagttttgaattagtctgcaaaaataaaaaaaaaaacaagcgtcatatcatagtagcctgacgaacagatggataaatcagtctttccatcacaagacaagccacagggtctccagctcgaccctcgtaaaacctgtcatcatgattaaacaacagcaccgaaagttcctcgcggtgaccagcatgaataattcttgatgaagcatacaatccagacatgttagcatcagttaacgagaaaaaacagccaacatagcctttgggtataattatgcttaatcgtaagtatagcaaagccacccctcgcggatacaaagtaaaaggcacaggagaataaaaaatataattatttctctgctgctgttcaggcaacgtcgcccccggtccctctaaatacacatacaaagcctcatcagccatggcttaccagacaaagtacagcgggcacacaaagcacaagctctaaagtgactctccaacctctccacaatatatatatacacaagccctaaactgacgtaatgggagtaaagtgtaaaaaatcccgccaaacccaacacacaccccgaaactgcgtcaccagggaaaagtacagtttcacttccgcaatcccaacaggcgtaacttcctctttctcacggtacgtgatatcccactaacttgcaacgtcattttcccacggtcgcaccgccccttttagccgttaaccccacagccaatcaccacacgatccacactttttaaaatcacctcatttacatattggcaccattccatctataaggtatattatatagataga

SEQ ID NO: 3 - DNA, 34493 bp, Artificial Sequence
  A virus genome sequence consisting of a transgene cassette that encodes an anti-VEGF full length antibody inserted in the region BY. The transgene cassette contains a SSA, ab heavy chain sequence with 5' leader, a SSA,and ab light chain sequence with
tctatctatataatataccttatagatggaatggtgccaatatgtaaatgaggtgattttaaaaagtgtggatcgtgtggtgattggctgtggggttaacggctaaaaggggcggtgcgaccgtgggaaaatgacgttttgtgggggtggagtttttttgcaagttgtcgcgggaaatgtgacgcataaaaaggcttttttctcacggaactacttagttttcccacggtatttaacaggaaatgaggtagttttgaccggatgcaagtgaaaattgttgattttcgcgcgaaaactgaatgaggaagtgtttttctgaataatgtggtatttatggcagggtggagtatttgttcagggccaggtagactttgacccattacgtggaggtttcgattaccgtgttttttacctgaatttccgcgtaccgtgtcaaagtcttctgtttttacgtaggtgtcagctgatcgctagggtatttatacctcagggtttgtgtcaagaggccactcttgagtgccagcgagaagagttttctcctctgcgccggcagtttaataataaaaaaatgagagatttgcgatttctgcctcaggaaataatctctgctgagactggaaatgaaatattggagcttgtggtgcacgccctgatgggagacgatccggagccacctgtgcagctttttgagcctcctacgcttcaggaactgtatgatttagaggtagagggatcggaggattctaatgaggaagctgtaaatggcttttttaccgattctatgcttttagctgctaatgaagggttagaattagatccgcctttggacacttttgatactccaggggtaattgtggaaagcggtacaggtgtaagaaaattacctgatttgagttccgtggactgtgatttgcactgctatgaagacgggtttcctccgagtgatgaggaggaccatgaaaaggagcagtccatgcagactgcagcgggtgagggagtgaaggctgccaatgttggttttcagttggattgcccggagcttcctggacatggctgtaagtcttgtgaatttcacaggaaaaatactggagtaaaggaactgttatgttcgctttgttatatgagaacgcactgccactttatttacagtaagtgtgtttaagttaaaatttaaaggaatatgctgtttttcacatgtatattgagtgtgagttttgtgcttcttattataggtcctgtgtctgatgctgatgaatcaccatctcctgattctactacctcacctcctgagattcaagcacctgttcctgtggacgtgcgcaagcccattcctgtgaagcttaagcctgggaaacgtccagcagtggaaaaacttgaggacttgttacagggtggggacggacctttggacttgagtacacggaaacgtccaagacaataagtgttccatatccgtgtttacttaaggtgacgtcaatatttgtgtgacagtgcaatgtaataaaaatatgttaactgttcactggtttttattgctttttgggcggggactcaggtatataagtagaagcagacctgtgtggttagctcataggagctggctttcatccatggaggtttgggccattttggaagaccttaggaagactaggcaactgttagagaacgcttcggacggagtctccggtttttggagattctggttcgctagtgaattagctagggtagtttttaggataaaacaggactataaacaagaatttgaaaagttgttggtagattgcccaggactttttgaagctcttaatttgggccatcaggttcactttaaagaaaaagttttatcagttttagacttttcaaccccaggtagaactgctgctgctgtggcttttcttacttttatattagataaatggatcccgcagactcatttcagcaggggatacgttttggatttcatagccacagcattgtggagaacatggaaggttcgcaagatgaggacaatcttaggttactggccagtgcagcctttgggtgtagcgggaatcctgaggcatccaccggtcatgccagcggttctggaggaggaacagcaagaggacaacccgagagccggcctggaccctccagtggaggaggcggagtagctgacttgtctcctgaactgcaacgggtgcttactggatctacgtccactggacgggataggggcgttaagagggagagggcatctagtggtactgatgctagatctgagttggctttaagtttaatgagtcgcagacgtcctgaaaccatttggtggcatgaggttcagaaagagggaagggatgaagtttctgtattgcaggagaaatattcactggaacaggtgaaaacatgttggttggagcctgaggatgattgggaggtggccattaaaaattatgccaagatagctttgaggcctgataaacagtataagattactagacggattaatatccggaatgcttgttacatatctggaaatggggctgaggtggtaatagatactcaagacaaggcagttattagatgctgcatgatggatatgtggcctggggtagtcggtatggaagcagtaacttttgtaaatgttaagtttaggggagatggttataatggaatagtgtttatggccaataccaaacttatattgcatggttgtagcttttttggtttcaacaatacctgtgtagatgcctggggacaggttagtgtacggggatgtagtttctatgcgtgttggattgccacagctggcagaaccaagagtcaattgtctctgaagaaatgcatatttcaaagatgtaacctgggcattctgaatgaaggcgaagcaagggtccgccactgcgcttctacagatactggatgttttattttgattaagggaaatgccagcgtaaagcataacatgatttgcggtgcttccgatgagaggccttatcaaatgctcacttgtgctggtgggcattgtaatatgctggctactgtgcatattgtttcccatcaacgcaaaaaatggcctgtttttgatcacaatgtgatgacgaagtgtaccatgcatgcaggtgggcgtagaggaatgtttatgccttaccagtgtaacatgaatcatgtgaaagtgttgttggaaccagatgccttttccagaatgagcctaacaggaatttttgacatgaacatgcaaatctggaagatcctgaggtatgatgatacgagatcgagggtacgcgcatgcgaatgcggaggcaagcatgccaggttccagccggtgtgtgtagatgtgactgaagatctcagaccggatcatttggttattgcccgcactggagcagagttcggatccagtggagaagaaactgactaaggtgagtattgggaaaactttggggtgggattttcagatggacagattgagtaaaaatttgttttttctgtcttgcagctgtcatgagtggaaacgcttcttttaaggggggagtcttcagcccttatctgacagggcgtctcccatcctgggcaggagttcgtcagaatgttatgggatctactgtggatggaagacccgtccaacccgccaattcttcaacgctgacctatgctactttaagttcttcacctttggacgcagctgcagctgccgccgccgcttctgttgccgctaacactgtgcttggaatgggttactatggaagcatcatggctaattccacttcctctaataacccttctaccctgactcaggacaagttacttgtccttttggcccagctggaggctttgacccaacgtctgggtgaactttctcagcaggtggtcgagttgcgagtacaaactgagtctgctgtcggcacggcaaagtctaaataaaaaaatcccagaatcaatgaataaataaacaagcttgttgttgatttaaaatcaagtgtttttatttcatttttcgcgcacggtatgccctagaccaccgatctctatcattgagaactcggtggattttttccaggatcctatagaggtgggattgaatgtttagatacatgggcattaggccgtctttggggtggagatagctccattgaagggattcatgctccggggtagtgttgtaaatcacccagtcataacaaggtcgcagtgcatggtgttgcacaatatcttttagaagtaggctgattgccacagataagcccttggtgtaggtgtttacaaaccggttgagctgggatgggtgcattcggggtgaaattatgtgcattttggattggatttttaagttggcaatattgccgccaagatcccgtcttgggttcatgttatgaaggaccaccaagacggtgtatccggtacatttaggaaatttatcgtgcagcttggatggaaaagcgtggaaaaatttggagacacccttgtgtcctccaagattttccatgcactcatccatgataatagcaatggggccgtgggcagcggcgcgggcaaacacgttccgtgggtctgacacatcatagttatgttcctgagttaaatcatcataagccattttaatgaatttggggcggagagtaccagattggggtatgaatgttccttcgggccccggagcatagttcccctcacagatttgcatttcccaagctttcagttccgagggtggaatcatgtccacctggggggctatgaaaaacaccgtttctggggcgggggtgattaattgtgatgatagcaaatttctgagcaattgagatttgccacatccggtggggccataaatgattccgattacgggttgcaggtggtagtttagggaacggcaactgccgtcttctcgaagcaagggggccacctcgttcatcatttcccttacatgcatattttcccgcaccaaatccattaggaggcgctctcctcctagtgatagaagttcttgtagtgaggaaaagtttttcagcggtttcagaccgtcagccatgggcattttggagagagtttgctgcaaaagttctagtctgttccacagttcagtgatgtgttctatggcatctcgatccagcagacctcctcgtttcgcgggtttggacggctcctggaatagggtatgagacgatgggcgtccagcgctgccagggttcggtccttccagggtctcagtgttcgagtcagggttgtttccgtcacagtgaaggggtgtgcgcctgcttgggcgcttgccagggtgcgcttcagactcatcctgctggtcgaaaacttctgtcgcttggcgccctgtatgtcggccaagtagcagtttaccatgagttcgtagttgagcgcctcggctgcgtggcctttggcgcggagcttacctttggaagttttcttgcataccgggcagtataggcatttcagcgcatacaacttgggcgcaaggaaaacggattctggggagtatgcatctgcgccgcaggaggcgcaaacagtttcacattccaccagccaggttaaatccggttcattggggtcaaaaacaagttttccgccatattttttgatgcgtttcttacctttggtctccatgagttcgtgtcctcgttgagtgacaaacaggctgtccgtgtccccgtagactgattttacaggcctcttctccagtggagtgcctcggtcttcttcgtacaggaactctgaccactctgatacaaaggcgcgcgtccaggccagcacaaaggaggctatgtgggaggggtagcgatcgttgtcaaccagggggtccaccttttccaaagtatgcaaacacatgtcaccctcttcaacatccaggaatgtgattggcttgtaggtgtatttcacgtgacctggggtccccgctgggggggtataaaagggggcggttctttgctcttcctcactgtcttccggatcgctgtccaggaacgtcagctgttggggtaggtattccctctcgaaggcgggcatgacctctgcactcaggttgtcagtttctaagaacgaggaggatttgatattgacagtgccggttgagatgcctttcatgaggttttcgtccatctggtcagaaaacacaatttttttattgtcaagtttggtggcaaatgatccatacagggcgttggataaaagtttggcaatggatcgcatggtttggttcttttccttgtccgcgcgctctttggcggcgatgttgagttggacatactcgcgtgccaggcacttccattcggggaagatagttgttaattcatctggcacgattctcacttgccaccctcgattatgcaaggtaattaaatccacactggtggccacctcgcctcgaaggggttcattggtccaacagagcctacctcctttcctagaacagaaagggggaagtgggtctagcataagttcatcgggagggtctgcatccatggtaaagattcccggaagtaaatccttatcaaaatagctgatgggagtggggtcatctaaggccatttgccattctcgagctgccagtgcgcgctcatatgggttaaggggactgccccatggcatgggatgggtgagtgcagaggcatacatgccacagatgtcatagacgtagatgggatcctcaaagatgcctatgtaggttggatagcatcgcccccctctgatacttgctcgcacatagtcatatagttcatgtgatggcgctagcagccccggacccaagttggtgcgattgggtttttctgttctgtagacgatctggcgaaagatggcgtgagaattggaagagatggtgggtctttgaaaaatgttgaaatgggcatgaggtagacctacagagtctctgacaaagtgggcataagattcttgaagcttggttaccagttcggcggtgacaagtacgtctagggcgcagtagtcaagtgtttcttgaatgatgtcataacctggttggtttttcttttcccacagttcgcggttgagaaggtattcttcgcgatccttccagtactcttctagcggaaacccgtctttgtctgcacggtaagatcctagcatgtagaactgattaactgccttgtaagggcagcagcccttctctacgggtagagagtatgcttgagcagcttttcgtagcgaagcgtgagtaagggcaaaggtgtctctgaccatgactttgaggaattggtatttgaagtcgatgtcgtcacaggctccctgttcccagagttggaagtctacccgtttcttgtaggcggggttgggcaaagcgaaagtaacatcattgaagagaatcttgccggccctgggcatgaaattgcgagtgatgcgaaaaggctgtggtacttccgctcggttattgataacctgggcagctaggacgatctcgtcgaaaccgttgatgttgtgtcctacgatgtataattctatgaaacgcggcgtgcctctgacgtgaggtagcttactgagctcatcaaaggttaggtctgtggggtcagataaggcgtagtgttcgagagcccattcgtgcaggtgaggattcgctttaaggaaggaggaccagaggtccactgccagtgctgtttgtaactggtcccggtactgacgaaaatgccgtccgactgccattttttctggggtgacgcaatagaaggtttgggggtcctgccgccagcgatcccacttgagttttatggcgaggtcataggcgatgttgacgagccgctggtctccagagagtttcatgaccagcatgaaggggattagctgcttgccaaaggaccccatccaggtgtaggtttccacatcgtaggtgagaaagagcctttctgtgcgaggatgagagccaatcgggaagaactggatctcctgccaccagttggaggaatggctgttgatgtgatggaagtagaactccctgcgacgcgccgagcattcatgcttgtgcttgtacagacggccgcagtagtcgcagcgttgcacgggttgtatctcgtgaatgagttgtacctggcttcccttgacgagaaatttcagtgggaagccgaggcctggcgattgtatctcgtgctttactatgttgtctgcatcggcctgttcatcttctgtctcgatggtggtcatgctgacgagccctcgcgggaggcaagtccagacctcggcgcggcaggggcggagctcgaggacgagagcgcgcaggctggagctgtccagggtcctgagacgctgcggactcaggttagtaggcagtgtcaggagattaacttgcatgatcttttggagggcgtgcgggaggttcagatagtacttgatctcaacgggtccgttggtggagatgtcgatggcttgcagggttccgtgtcccttgggcgctaccaccgtgcccttgtttttcattttggacggcggtggctctgttgcttcttgcatgtttagaagcggtgtcgagggcgcgcaccgggcggcaggggcggctcgggacccggcggcatggctggcagtggtacgtcggcgccgcgcgcgggtaggttctggtactgcgccctgagaagactcgcatgcgcgacgacgcggcggttgacatcctggatctgacgcctctgggtgaaagctaccggccccgtgagcttgaacctgaaagagagttcaacagaatcaatctcggtatcgttgacggcggcttgcctaaggatttcttgcacgtcaccagagttgtcctggtaggcgatctccgccatgaactgctcgatctcttcctcttgaagatctccgcggcccgctctctcgacggtggccgcgaggtcgttggagatgcgcccaatgagttgagagaatgcattcatgcccgcctcgttccagacgcggctgtagaccacggcccccacgggatctctcgcgcgcatgaccacctgggcgaggttgagctccacgtggcgggtgaagaccgcatagttgcataggcgctggaaaaggtagttgagtgtggtggcgatgtgctcggtgacgaagaaatacatgatccatcgtctcagcggcatctcgctgacatcgcccagagcttccaagcgctccatggcctcgtagaagtccacggcaaaattaaaaaactgggagtttcgcgcggacacggtcaactcctcttccagaagacggataagttcggcgatggtggtgcgcacctcgcgctcgaaagcccctgggatttcttcctcaatctcttcttcttccactaacatctcttcctcttcaggtggggctgcaggaggagggggaacgcggcgacgccggcggcgcacgggcagacggtcgatgaatctttcaatgacctctccgcggcggcggcgcatggtttcagtgacggcgcggccgttctcgcgcggtcgcagagtaaaaacaccgccgcgcatctccttaaagtggtgactgggaggttctccgtttgggagggagagggcgctgattatacattttattaattggcccgtagggactgcacgcagagatctgatcgtgtcaagatccacgggatctgaaaacctttcgacgaaagcgtctaaccagtcacagtcacaaggtaggctgagtacggcttcttgtgggcgggggtggttatgtgttcggtctgggtcttctgtttcttcttcatctcgggaaggtgagacgatgctgctggtgatgaaattaaagtaggcagttctaagacggcggatggtggcgaggagcaccaggtctttgggtccggcttgctggatacgcaggcgattggccattccccaagcattatcctgacatctagcaagatctttgtagtagtcttgcatgagccgttctacgggcacttcttcctcacccgttctgccatgcatacgtgtgagtccaaatccgcgcattggttgtaccagtgccaagtcagctacgactctttcggcgaggatggcttgctgtacttgggtaagggtggcttgaaagtcatcaaaatccacaaagcggtggtaagctcctgtattaatggtgtaagcacagttggccatgactgaccagttaactgtctggtgaccagggcgcacgagctcggtgtatttaaggcgcgaataggcgcgggtgtcaaagatgtaatcgttgcaggtgcgcaccagatactggtaccctataagaaaatgcggcggtggttggcggtagagaggccatcgttctgtagctggagcgccaggggcgaggtcttccaacataaggcggtgatagccgtagatgtacctggacatccaggtgattcctgcggcggtagtagaagcccgaggaaactcgcgtacgcggttccaaatgttgcgtagcggcatgaagtagttcattgtaggcacggtttgaccagtgaggcgcgcgcagtcattgatgctctatagacacggagaaaatgaaagcgttcagcgactcgactccgtagcctggaggaacgtgaacgggttgggtcgcggtgtaccccggttcgagacttgtactcgagccggccggagccgcggctaacgtggtattggcactcccgtctcgacccagcctacaaaaatccaggatacggaatcgagtcgttttgctggtttccgaatggcagggaagtgagtcctattttttttttttgccgctcagatgcatcccgtgctgcgacagatgcgcccccaacaacagcccccctcgcagcagcagcagcagcaatcacaaaaggctgtccctgcaactactgcaactgccgccgtgagcggtgcgggacagcccgcctatgatctggacttggaagagggcgaaggactggcacgtctaggtgcgccttcacccgagcggcatccgcgagttcaactgaaaaaagattctcgcgaggcgtatgtgccccaacagaacctatttagagacagaagcggcgaggagccggaggagatgcgagcttcccgctttaacgcgggtcgtgagctgcgtcacggtttggaccgaagacgagtgttgcgggacgaggatttcgaagttgatgaaatgacagggatcagtcctgccagggcacacgtggctgcagccaaccttgtatcggcttacgagcagacagtaaaggaagagcgtaacttccaaaagtcttttaataatcatgtgcgaaccctgattgcccgcgaagaagttacccttggtttgatgcatttgtgggatttgatggaagctatcattcagaaccctactagcaaacctctgaccgcccagctgtttctggtggtgcaacacagcagagacaatgaggctttcagagaggcgctgctgaacatcaccgaacccgaggggagatggttgtatgatcttatcaacattctacagagtatcatagtgcaggagcggagcctgggcctggccgagaaggtggctgccatcaattactcggttttgagcttgggaaaatattacgctcgcaaaatctacaagactccatacgttcccatagacaaggaggtgaagatagatgggttctacatgcgcatgacgctcaaggtcttgaccctgagcgatgatcttggggtgtatcgcaatgacagaatgcatcgcgcggttagcgccagcaggaggcgcgagttaagcgacagggaactgatgcacagtttgcaaagagctctgactggagctggaaccgagggtgagaattacttcgacatgggagctgacttgcagtggcagcctagtcgcagggctctgagcgccgcgacggcaggatgtgagcttccttacatagaagaggcggatgaaggcgaggaggaagagggcgagtacttggaagactgatggcacaacccgtgttttttgctagatggaacagcaagcaccggatcccgcaatgcgggcggcgctgcagagccagccgtccggcattaactcctcggacgattggacccaggccatgcaacgtatcatggcgttgacgactcgcaaccccgaagcctttagacagcaaccccaggccaaccgtctatcggccatcatggaagctgtagtgccttcccgctctaatcccactcatgagaaggtcctggccatcgtgaacgcgttggtggagaacaaagctattcgtccagatgaggccggactggtatacaacgctctcttagaacgcgtggctcgctacaacagtagcaatgtgcaaaccaatttggaccgtatgataacagatgtacgcgaagccgtgtctcagcgcgaaaggttccagcgtgatgccaacctgggttcgctggtggcgttaaatgctttcttgagtactcagcctgctaatgtgccgcgtggtcaacaggattatactaactttttaagtgctttgagactgatggtatcagaagtacctcagagcgaagtgtatcagtccggtcctgattacttctttcagactagcagacagggcttgcagacggtaaatctgagccaagcttttaaaaaccttaaaggtttgtggggagtgcatgccccggtaggagaaagagcaaccgtgtctagcttgttaactccgaactcccgcctattattactgttggtagctcctttcaccgacagcggtagcatcgaccgtaattcctatttgggttacctactaaacctgtatcgcgaagccatagggcaaagtcaggtggacgagcagacctatcaagaaattacccaagtcagtcgcgctttgggacaggaagacactggcagtttggaagccactctgaacttcttgcttaccaatcggtctcaaaagatccctcctcaatatgctcttactgcggaggaggagaggatccttagatatgtgcagcagagcgtgggattgtttctgatgcaagagggggcaactccgactgcagcactggacatgacagcgcgaaatatggagcccagcatgtatgccagtaaccgacctttcattaacaaactgctggactacttgcacagagctgccgctatgaactctgattatttcaccaatgccatcttaaacccgcactggctgcccccacctggtttctacacgggcgaatatgacatgcccgaccctaatgacggatttctgtgggacgacgtggacagcgatgttttttcacctctttctgatcatcgcacgtggaaaaaggaaggcggcgatagaatgcattcttctgcatcgctgtccggggtcatgggtgctaccgcggctgagcccgagtctgcaagtccttttcctagtctacccttttctctacacagtgtacgtagcagcgaagtgggtagaataagtcgcccgagtttaatgggcgaagaggagtatctaaacgattccttgctcagaccggcaagagaaaaaaatttcccaaacaatggaatagaaagtttggtggataaaatgagtagatggaagacttatgctcaggatcacagagacgagcctgggatcatggggattacaagtagagcgagccgtagacgccagcgccatgacagacagaggggtcttgtgtgggacgatgaggattcggccgatgatagcagcgtgctggacttgggtgggagaggaaggggcaacccgtttgctcatttgcgccctcgcttgggtggtatgttgtaaaaaaaaataaaaaaaaaactcaccaaggccatggcgacgagcgtacgttcgttcttctttattatctgtgtctagtataatgaggcgagtcgtgctaggcggagcggtggtgtatccggagggtcctcctccttcgtacgagagcgtgatgcagcagcagcaggcgacggcggtgatgcaatccccactggaggctccctttgtgcctccgcgatacctggcacctacggagggcagaaacagcattcgttattcggaactggcacctcagtacgataccaccaggttgtatctggtggacaacaagtcggcggacattgcttctctgaactatcagaatgaccacagcaacttcttgaccacggtggtgcaaaacaatgactttacccctacggaagccagcacccagaccattaactttgatgaacgatcgcggtggggcggtcagctaaagaccatcatgcatactaacatgccaaacgtgaacgagtatatgtttagtaacaagttcaaagcgcgtgtgatggtgtccagaaaacctcccgacggtgctgcagttggggatacttatgatcacaagcaggatattttgaaatatgagtggttcgagtttactttgccagaaggcaacttttcagttactatgactattgatttgatgaacaatgccatcatagataattacttgaaagtgggtagacagaatggagtgcttgaaagtgacattggtgttaagttcgacaccaggaacttcaagctgggatgggatcccgaaaccaagttgatcatgcctggagtgtatacgtatgaagccttccatcctgacattgtcttactgcctggctgcggagtggattttaccgagagtcgtttgagcaaccttcttggtatcagaaaaaaacagccatttcaagagggttttaagattttgtatgaagatttagaaggtggtaatattccggccctcttggatgtagatgcctatgagaacagtaagaaagaacaaaaagccaaaatagaagctgctacagctgctgcagaagctaaggcaaacatagttgccagcgactctacaagggttgctaacgctggagaggtcagaggagacaattttgcgccaacacctgttccgactgcagaatcattattggccgatgtgtctgaaggaacggacgtgaaactcactattcaacctgtagaaaaagatagtaagaatagaagctataatgtgttggaagacaaaatcaacacagcctatcgcagttggtatctttcgtacaattatggcgatcccgaaaaaggagtgcgttcctggacattgctcaccacctcagatgtcacctgcggagcagagcaggtctactggtcgcttccagacatgatgaaggatcctgtcactttccgctccactagacaagtcagtaactaccctgtggtgggtgcagagcttatgcccgtcttctcaaagagcttctacaacgaacaagctgtgtactcccagcagctccgccagtccacctcgcttacgcacgtcttcaaccgctttcctgagaaccagattttaatccgtccgccggcgcccaccattaccaccgtcagtgaaaacgttcctgctctcacagatcacgggaccctgccgttgcgcagcagtatccggggagtccaacgtgtgaccgttactgacgccagacgccgcacctgtccctacgtgtacaaggcactgggcatagtcgcaccgcgcgtcctttcaagccgcactttctaaaaaaaaaaaaaatgtccattcttatctcgcccagtaataacaccggttggggtctgcgcgctccaagcaagatgtacggaggcgcacgcaaacgttctacccaacatcctgtccgtgttcgcggacattttcgcgctccatggggcgccctcaagggccgcactcgcgttcgaaccaccgtcgatgatgtaatcgatcaggtggttgccgacgcccgtaattatactcctactgcgcctacatctactgtggatgcagttattgacagtgtagtggctgacgctcgcaactatgctcgacgtaagagccggcgaaggcgcattgccagacgccaccgagctaccactgccatgcgagccgcaagagctctgctacgaagagctagacgcgtggggcgaagagccatgcttagggcggccagacgtgcagcttcgggcgccagcgccggcaggtcccgcaggcaagcagccgctgtcgcagcggcgactattgccgacatggcccaatcgcgaagaggcaatgtatactgggtgcgtgacgctgccaccggtcaacgtgtacccgtgcgcacccgtccccctcgcacttagaagatactgagcagtctccgatgttgtgtcccagcggcgaggatgtccaagcgcaaatacaaggaagaaatgctgcaggttatcgcacctgaagtctacggccaaccgttgaaggatgaaaaaaaaccccgcaaaatcaagcgggttaaaaaggacaaaaaagaagaggaagatggcgatgatgggctggcggagtttgtgcgcgagtttgccccacggcgacgcgtgcaatggcgtgggcgcaaagttcgacatgtgttgagacctggaacttcggtggtctttacacccggcgagcgttcaagcgctacttttaagcgttcctatgatgaggtgtacggggatgatgatattcttgagcaggcggctgaccgattaggcgagtttgcttatggcaagcgtagtagaataacttccaaggatgagacagtgtcgatacccttggatcatggaaatcccacccctagtcttaaaccggtcactttgcagcaagtgttacccgtaactccgcgaacaggtgttaaacgcgaaggtgaagatttgtatcccactatgcaactgatggtacccaaacgccagaagttggaggacgttttggagaaagtaaaagtggatccagatattcaacctgaggttaaagtgagacccattaagcaggtagcgcctggtctgggggtacaaactgtagacattaagattcccactgaaagtatggaagtgcaaactgaacccgcaaagcctactgccacctccactgaagtgcaaacggatccatggatgcccatgcctattacaactgacgccgccggtcccactcgaagatcccgacgaaagtacggtccagcaagtctgttgatgcccaattatgttgtacacccatctattattcctactcctggttaccgaggcactcgctactatcgcagccgaaacagtacctcccgccgtcgccgcaagacacctgcaaatcgcagtcgtcgccgtagacgcacaagcaaaccgactcccggcgccctggtgcggcaagtgtaccgcaatggtagtgcggaacctttgacactgccgcgtgcgcgttaccatccgagtatcatcacttaatcaatgttgccgctgcctccttgcagatatggccctcacttgtcgccttcgcgttcccatcactggttaccgaggaagaaactcgcgccgtagaagagggatgttgggacgcggaatgcgacgctacaggcgacggcgtgctatccgcaagcaattgcggggtggttttttaccagccttaattccaattatcgctgctgcaattggcgcgataccaggcatagcttccgtggcggttcaggcctcgcaacgacattgacattggaaaaaaacgtataaataaaaaaaaaaaaatacaatggactctgacactcctggtcctgtgactatgttttcttagagatggaagacatcaatttttcatccttggctccgcgacacggcacgaagccgtacatgggcacctggagcgacatcggcacgagccaactgaacgggggcgccttcaattggagcagtatctggagcgggcttaaaaattttggctcaaccataaaaacatacgggaacaaagcttggaacagcagtacaggacaggcgcttagaaataaacttaaagaccagaacttccaacaaaaagtagtcgatgggatagcttccggcatcaatggagtggtagatttggctaaccaggctgtgcagaaaaagataaacagtcgtttggacccgccgccagcaaccccaggtgaaatgcaagtggaggaagaaattcctccgccagaaaaacgaggcgacaagcgtccgcgtcccgatttggaagagacgctggtgacgcgcgtagatgaaccgccttcttatgaggaagcaacgaagcttggaatgcccaccactagaccgatagccccaatggccaccggggtgatgaaaccttctcagttgcatcgacccgtcaccttggatttgccccctccccctgctgctactgctgtacccgcttctaagcctgtcgctgccccgaaaccagtcgccgtagccaggtcacgtcccgggggcgctcctcgtccaaatgcgcactggcaaaatactctgaacagcatcgtgggtctaggcgtgcaaagtgtaaaacgccgtcgctgcttttaattaaatatggagtagcgcttaacttgcctatctgtgtatatgtgtcattacacgccgtcacagcagcagaggaaaaaaggaagaggtcgtgcgtcgacgctgagttactttcaagatggccaccccatcgatgctgccccaatgggcatacatgcacatcgccggacaggatgcttcggagtacctgagtccgggtctggtgcagttcgcccgcgccacagacacctacttcaatctgggaaataagtttagaaatcccaccgtagcgccgacccacgatgtgaccaccgaccgtagccagcggctcatgttgcgcttcgtgcccgttgaccgggaggacaatacatactcttacaaagtgcggtacaccctggccgtgggcgacaacagagtgctggatatggccagcacgttctttgacattaggggtgtgttggacagaggtcccagtttcaaaccctattctggtacggcttacaactccctggctcctaaaggcgctccaaatacatctcagtggattgcagaaggtgtaaaaaatacaactggtgaggaacacgtaacagaagaggaaaccaatactactacttacacttttggcaatgctcctgtaaaagctgaagctgaaattacaaaagaaggactcccagtaggtttggaagtttcagatgaagaaagtaaaccgatttatgctgataaaacatatcagccagaacctcagctgggagatgaaacttggactgaccttgatggaaaaaccgaaaagtatggaggcagggctctcaaacccgatactaagatgaaaccatgctacgggtcctttgccaaacctactaatgtgaaaggcggtcaggcaaaacaaaaaacaacggagcagccaaatcagaaagtcgaatatgatatcgacatggagttttttgatgcggcatcgcagaaaacaaacttaagtcctaaaattgtcatgtatgcagaaaatgtaaatttggaaactccagacactcatgtagtgtacaaacctggaacagaagacacaagttccgaagctaatttgggacaacaatctatgcccaacagacccaactacattggcttcagagataactttattggacttatgtactataacagtactggtaacatgggggtgctggctggtcaagcgtctcagttaaatgcagtggttgacttgcaggacagaaacacagaactttcttaccaactcttgcttgactctctgggcgacagaaccagatactttagcatgtggaatcaggctgtggacagttatgatcctgatgtacgtgttattgaaaatcatggtgtggaagatgaacttcccaactactgttttccactggacggcataggtgttccaacaaccagttacaaatcaatagttccaaatggagacaatgcgcctaattggaaggaacctgaagtaaatggaacaagtgagatcggacagggtaatttgtttgccatggaaattaaccttcaagccaatctatggcgaagtttcctttattccaatgtggctctatatctcccagactcgtacaaatacaccccgtccaatgtcactcttccagaaaacaaaaacacctacgactacatgaacgggcgggtggtgccgccatctctagtagacacctatgtgaacattggtgccaggtggtctctggatgccatggacaatgtcaacccattcaaccaccaccgtaacgctggcttgcgttaccgatccatgcttctgggtaacggacgttatgtgcctttccacatacaagtgcctcaaaaattcttcgctgttaaaaacctgctgcttctcccaggctcctacacttatgagtggaactttaggaaggatgtgaacatggttctacagagttccctcggtaacgacctgcgggtagatggcgccagcatcagtttcacgagcatcaacctctatgctacttttttccccatggctcacaacaccgcttccacccttgaagccatgctgcggaatgacaccaatgatcagtcattcaacgactacctatctgcagctaacatgctctaccccattcctgccaatgcaaccaatattcccatttccattccttctcgcaactgggcggctttcagaggctggtcatttaccagactgaaaaccaaagaaactccctctttggggtctggatttgacccctactttgtctattctggttctattccctacctggatggtaccttctacctgaaccacacttttaagaaggtttccatcatgtttgactcttcagtgagctggcctggaaatgacaggttactatctcctaacgaatttgaaataaagcgcactgtggatggcgaaggctacaacgtagcccaatgcaacatgaccaaagactggttcttggtacagatgctcgccaactacaacatcggctatcagggcttctacattccagaaggatacaaagatcgcatgtattcatttttcagaaacttccagcccatgagcaggcaggtggttgatgaggtcaattacaaagacttcaaggccgtcgccataccctaccaacacaacaactctggctttgtgggttacatggctccgaccatgcgccaaggtcaaccctatcccgctaactatccctatccactcattggaacaactgccgtaaatagtgttacgcagaaaaagttcttgtgtgacagaaccatgtggcgcataccgttctcgagcaacttcatgtctatgggggcccttacagacttgggacagaatatgctctatgccaactcagctcatgctctggacatgacctttgaggtggatcccatggatgagcccaccctgctttatcttctcttcgaagttttcgacgtggtcagagtgcatcagccacaccgcggcatcatcgaggcagtctacctgcgtacaccgttctcggccggtaacgctaccacgtaagaagcttcttgcttcttgcaaatagcagctgcaaccatggcctgcggatcccaaaacggctccagcgagcaagagctcagagccattgtccaagacctgggttgcggaccctattttttgggaacctacgataagcgcttcccggggttcatggcccccgataagctcgcctgtgccattgtaaatacggccggacgtgagacggggggagagcactggttggctttcggttggaacccacgttctaacacctgctacctttttgatccttttggattctcggatgatcgtctcaaacagatttaccagtttgaatatgagggtctcctgcgccgcagcgctcttgctaccaaggaccgctgtattacgctggaaaaatctacccagaccgtgcagggtccccgttctgccgcctgcggacttttctgctgcatgttccttcacgcctttgtgcactggcctgaccgtcccatggacggaaaccccaccatgaaattgctaactggagtgccaaacaacatgcttcattctcctaaagtccagcccaccctgtgtgacaatcaaaaagcactctaccattttcttaatacccattcgccttattttcgctcccatcgtacacacatcgaaagggccactgcgttcgaccgtatggatgttcaataatgactcatgtaaacaacgtgttcaataaacatcactttatttttttacatgtatcaaggctctgcattacttatttatttacaagtcgaatgggttctgacgagaatcagaatgacccgcaggcagtgatacgttgcggaactgatacttgggttgccacttgaattcgggaatcaccaacttgggaaccggtatatcgggcaggatgtcactccacagctttctggtcagctgcaaagctccaagcaggtcaggagccgaaatcttgaaatcacaattaggaccagtgctttgagcgcgagagttgcggtacaccggattgcagcactgaaacaccatcagcgacggatgtctcacgcttgccagcacggtgggatctgcaatcatgcccacatccagatcttcagcattggcaatgctgaacggggtcatcttgcaggtctgcctacccatggcgggcacccaattaggcttgtggttgcaatcgcagtgcagggggatcagtatcatcttggcctgatcctgtctgattcctggatacacggctctcatgaaagcatcatattgcttgaaagcctgctgggctttactaccctcggtataaaacatcccgcaggacctgctcgaaaactggttagctgcacagccggcatcattcacacagcagcgggcgtcattgttagctatttgcaccacacttctgccccagcggttttgggtgattttggttcgctcgggattctcctttaaggctcgttgtccgttctcgctggccacatccatctcgataatctgctccttctgaatcataatattgccatgcaggcacttcagcttgccctcataatcattgcagccatgaggccacaacgcacagcctgtacattcccaattatggtgggcgatctgagaaaaagaatgtatcattccctgcagaaatcttcccatcatcgtgctcagtgtcttgtgactagtgaaagttaactggatgcctcggtgctcctcgtttacgtactggtgacagatgcgcttgtattgttcgtgttgctcaggcattagtttaaaagaggttctaagttcgttatccagcctgtacttctccatcagcagacacatcacttccatgcctttctcccaagcagacaccaggggcaagctaatcggattcttaacagtgcaggcagcagctcctttagccagagggtcatctttagcgatcttctcaatgcttcttttgccatccttctcaacgatgcgcacgggcgggtagctgaaacccactgctacaagttgcgcctcttctctttcttcttcgctgtcttgactgatgtcttgcatggggatatgtttggtcttccttggcttctttttggggggtatcggaggaggaggactgtcgctccgttccggagacagggaggattgtgacgtttcgctcaccattaccaactgactgtcggtagaagaacctgaccccacacggcgacaggtgtttctcttcgggggcagaggtggaggcgattgcgaagggctgcggtccgacctggaaggcggatgactggcagaaccccttccgcgttcgggggtgtgctccctgtggcggtcgcttaactgatttccttcgcggctggccattgtgttctcctaggcagagaaacaacagacatggaaactcagccattgctgtcaacatcgccacgagtgccatcacatctcgtcctcagcgacgaggaaaaggagcagagcttaagcattccaccgcccagtcctgccaccacctctaccctagaagataaggaggtcgacgcatctcatgacatgcagaataaaaaagcgaaagagtctgagacagacatcgagcaagacccgggctatgtgacaccggtggaacacgaggaagagttgaaacgctttctagagagagaggatgaaaactgcccaaaacaacgagcagataactatcaccaagatgctggaaatagggatcagaacaccgactacctcatagggcttgacggggaagacgcgctccttaaacatctagcaagacagtcgctcatagtcaaggatgcattattggacagaactgaagtgcccatcagtgtggaagagctcagccgcgcctacgagcttaacctcttttcacctcgtactccccccaaacgtcagccaaacggcacctgcgagccaaatcctcgcttaaacttttatccagcttttgctgtgccagaagtactggctacctatcacatcttttttaaaaatcaaaaaattccagtctcctgccgcgctaatcgcacccgcgccgatgccctactcaatctgggacctggttcacgcttacctgatatagcttccttggaagaggttccaaagatcttcgagggtctgggcaataatgagactcgggccgcaaatgctctgcaaaagggagaaaatggcatggatgagcatcacagcgttctggtggaattggaaggcgataatgccagactcgcagtactcaagcgaagcatcgaggtcacacacttcgcatatcccgctgtcaacctgccccctaaagtcatgacggcggtcatggaccagttactcattaagcgcgcaagtcccctttcagaagacatgcatgacccagatgcctgtgatgagggtaaaccagtggtcagtgatgagcagctaacccgatggctgggcaccgactctcccagggatttggaagagcgtcgcaagcttatgatggccgtggtgctggttaccgtagaactagagtgtctccgacgtttctttaccgattcagaaaccttgcgcaaactcgaagagaatctgcactacacttttagacacggctttgtgcggcaggcatgcaagatatctaacgtggaactcaccaacctggtttcctacatgggtattctgcatgagaatcgcctaggacaaagcgtgctgcacagcaccctgaagggggaagcccgccgtgattacatccgcgattgtgtctatctgtacctgtgccacacgtggcaaaccggcatgggtgtatggcagcaatgtttagaagaacagaacttgaaagagcttgacaagctcttacagaaatctcttaaggttctgtggacagggttcgacgagcgcaccgtcgcttccgacctggcagacctcatcttcccagagcgtctcagggttactttgcgaaacggattgcctgactttatgagccagagcatgcttaacaattttcgctctttcatcctggaacgctccggtatcctgcccgccacctgctgcgcactgccctccgactttgtgcctctcacctaccgcgagtgccccccgccgctatggagtcactgctacctgttccgtctggccaactatctctcctaccactcggatgtgatcgaggatgtgagcggagacggcttgctggagtgtcactgccgctgcaatctgtgcacgccccaccggtccctagcttgcaacccccagttgatgagcgaaacccagataataggcacctttgaattgcaaggccccagcagccaaggcgatgggtcttctcctgggcaaagtttaaaactgaccccgggactgtggacctccgcctacttgcgcaagtttgctccggaagattaccacccctatgaaatcaagttctatgaggaccaatcacagcctccaaaggccgaactttcggcctgcgtcatcacccagggggcaattctggcccaattgcaagccatccaaaaatcccgccaagaatttctactgaaaaagggtaagggggtctaccttgacccccagaccggcgaggaactcaacacaaggttccctcaggatgtcccaacgacgagaaaacaagaagttgaaggtgcagccgccgcccccagaagatatggaggaagattgggacagtcaggcagaggaggcggaggaggacagtctggaggacagtctggaggaagacagtttggaggaggaaaacgaggaggcagaggaggtggaagaagtaaccgccgacaaacagttatcctcggctgcggagacaagcaacagcgctaccatctccgctccgagtcgaggaacccggcggcgtcccagcagtagatgggacgagaccggacgcttcccgaacccaaccagcgcttccaagaccggtaagaaggatcggcagggatacaagtcctggcgggggcataagaatgccatcatctcctgcttgcatgagtgcgggggcaacatatccttcacgcggcgctacttgctattccaccatggggtgaactttccgcgcaatgttttgcattactaccgtcacctccacagcccctactatagccagcaaatcccggcagtctcgacagataaagacagcggcggcgacctccaacagaaaaccagcagcggcagttagaaaatacacaacaagtgcagcaacaggaggattaaagattacagccaacgagccagcgcaaacccgagagttaagaaatcggatctttccaaccctgtatgccatcttccagcagagtcggggtcaagagcaggaactgaaaataaaaaaccgatctctgcgttcgctcaccagaagttgtttgtatcacaagagcgaagatcaacttcagcgcactctcgaggacgccgaggctctcttcaacaagtactgcgcgctgactcttaaagagtaggcagcgaccgcgcttattcaaaaaaggcgggaattacatcatcctcgacatgagtaaagaaattcccacgccttacatgtggagttatcaaccccaaatgggattggcggcaggcgcctcccaggactactccacccgcatgaattggctcagcgccgggccttctatgatttctcgagttaatgatatacgcgcctaccgaaaccaaatacttttggaacagtcagctcttaccaccacgccccgccaacaccttaatcccagaaattggcccgccgccctagtgtaccaggaaagtcccgctcccaccactgtattacttcctcgagacgcccaggccgaagtccaaatgactaatgcaggtgcgcagttagctggcggctccaccctatgtcgtcacaggcctcggcataatataaaacgcctgatgatcagaggccgaggtatccagctcaacgacgagtcggtgagctctccgcttggtctacgaccagacggaatctttcagattgccggctgcgggagatcttccttcacccctcgtcaggctgttctgactttggaaagttcgtcttcgcaaccccgctcgggcggaatcgggaccgttcaatttgtggaggagtttactccctctgtctacttcaaccccttctccggatctcctgggcattacccggacgagttcataccgaacttcgacgcgattagcgagtcagtggacggctacgattgatgtctggtgacgcggctgagctatctcggctgcgacatctagaccactgccgccgctttcgctgctttgcccgggaactcattgagttcatctacttcgaactccccaaggatcaccctcaaggtccggcccacggagtgcggatttctatcgaaggcaaaatagactctcgcctgcaacgaattttctcccagcggcccgtgctgatcgagcgagaccagggaaacaccacggtttccatctactgcatttgtaatcaccccggattgcatgaaagcctttgctgtcttatgtgtactgagtttaataaaaactgaattaagactctcctacggactgccgcttcttcaacccggattttacaaccagaagaacgaaacttttcctgtcgtccaggactctgttaacttcacctttcctactcacaaactagaagctcaacgactacaccgcttttccagaagcattttccctactaatactactttcaaaaccggaggtgagctccaaggtcttcctacagaaaacccttgggtggaagcgggccttgtagtgctaggaattcttgcgggtgggcttgtgattattctttgctacctatacacaccttgcttcactttcttagtggtgttgtggtattggtttaaaaaatggggcccatactagtcttgcttgttttactttcgcttttggaaccgggttctgccaattacgatccatgtctagacttcgacccagaaaactgcacacttacttttgcacccgacacaagccgcatctgtggagttcatcgcctctcttacgaacttggcccccaacgacaaaaatttacctgcatggtgggaatcaaccccatagttatcacccagcaaagtggagatactaagggttgcattcactgctcctgcgattccatcgagtgcacctacaccctgctgaagaccctatgcggcctaagagacctgctaccaatgaattaaaaaatgattaataaaaaatcacttacttgaaatcagcaataaggtctctgttgaaattttctcccagcagcacctcacttccctcttcccaactctggtattctaaaccccgttcagcggcatactttctccatactttaaaggggatgtcaaattttagctcctctcctgtacccacaatcttcatgtctttcttcccagatgaccaagagagtccggctcagtgactccttcaaccctgtctacccctatgaagatgaaagcacctcccaacacccctttataaacccagggtttatttccccaaatggcttcacacaaagcccaaacggagttcttactttaaaatgtttaaccccactaacaaccacaggcggatctctacagctaaaagtgggagggggacttacagtggatgacaccaacggttttttgaaagaaaacataagtgccaccacaccactcgttaagactggtcactctataggtttaccactaggagccggattgggaacgaatgaaaataaactttgtatcaaattaggacaaggacttacattcaattcaaacaacatttgcattgatgacaatattaacaccttatggacaggagtcaaccccaccgaagccaactgtcaaatcatgaactccagtgaatctaatgattgcaaattaattctaacactagttaaaactggagcactagtcactgcatttgtttatgttataggagtatctaacaattttaatatgctaactacacacagaaatataaattttactgcagagctgtttttcgattctactggtaatttactaactagactctcatccctcaaaactccacttaatcataaatcaggacaaaacatggctactggtgccattactaatgctaaaggtttcatgcccagcacgactgcctatcctttcaatgataattctagagaaaaagaaaactacatttacggaacttgttactacacagctagtgatcgcactgcttttcccattgacatatctgtcatgcttaaccgaagagcaataaatgacgagacatcatattgtattcgtataacttggtcctggaacacaggagatgccccagaggtgcaaacctctgctacaaccctagtcacctccccatttaccttttactacatcagagaagacgactgacaaataaagtttgcgatcgccaggccaccatgggatggagctgtatcatcctcttcttggtagcaacagctacaggtgtccactccgaggttcagctggtggagtctggcggtggcctggtgcagccagggggctcactccgtttgtcctgtgcagcttctggctataccttcaccaactatggtatgaactgggtccgtcaggccccgggtaagggcctggaatgggttggatggattaacacctataccggtgaaccgacctatgctgcggatttcaaacgtcgttttactttttctctggacacctccaagagcacagcttacctgcagatgaacagcctgcgcgctgaggacactgccgtctattactgtgcaaagtacccgcactattatgggagcagccactggtatttcgacgtctggggtcaaggaaccctggtcaccgtctcctcggcctccaccaagggcccatcggtcttccccctggcaccctcctccaagagcacctctgggggcacagcggccctgggctgcctggtcaaggactacttccccgaaccggtgacggtgtcgtggaactcaggcgccctgaccagcggcgtgcacaccttcccggctgtcctacagtcctcaggactctactccctcagcagcgtggtgaccgtgccctccagcagcttgggcacccagacctacatctgcaacgtgaatcacaagcccagcaacaccaaggtcgacaagaaagttgagcccaaatcttgtgacaaaactcacacatgcccaccgtgcccagcacctgagctcctggggggaccgtcagtcttcctcttccccccaaaacccaaggacaccctcatgatctcccggacccctgaggtcacatgcgtggtggtggacgtgagccacgaagaccctgaggtcaagttcaactggtacgtggacggcgtggaggtgcataatgccaagacaaagccgcgggaggagcagtacaacagcacgtaccgtgtggtcagcgtcctcaccgtcctgcaccaggactggctgaatggcaaggagtacaagtgcaaggtctccaacaaagccctcccagcccccatcgagaaaaccatctccaaagccaaagggcagccccgagaaccacaggtgtacaccctgcccccatcccgggaggagatgaccaagaaccaggtcagcctgacctgcctggtcaaaggcttctatcccagcgacatcgccgtggagtgggagagcaatgggcagccggagaacaactacaagaccacgcctcccgtgctggactccgacggctccttcttcctctacagcaagctcaccgtggacaagagcaggtggcagcaggggaacgtcttctcatgctccgtgatgcacgaggctctgcacaaccactacacgcagaagagcctctccctgtctccgggtaaatgatctagactcgagcaggcgagcatggactggacctggcgcgtgttttgcctgctcgccgtggctcctggggcccacagcgatatccagatgacccagtccccgagctccctgtccgcctctgtgggcgatagggtcaccatcacctgcagcgcaagtcaggatattagcaactatttaaactggtatcaacagaaaccaggaaaagctccgaaagtcctgatttacttcacctcctctctccactctggagtcccttctcgcttctctggatccggttctgggacggatttcactctgaccatcagcagtctgcagccagaagacttcgcaacttattactgtcaacagtatagcaccgtgccgtggacgtttggacagggtaccaaggtggagatcaaacgaactgtggctgcaccatctgtcttcatcttcccgccatctgatgagcagttgaaatctggaactgcttctgttgtgtgcctgctgaataacttctatcccagagaggccaaagtacagtggaaggtggataacgccctccaatcgggtaactcccaggagagtgtcacagagcaggacagcaaggacagcacctacagcctcagcagcaccctgacgctgagcaaagcagactacgagaaacacaaagtctacgcctgcgaagtcacccatcagggcctgagctcgcccgtcacaaagagcttcaacaggggagagtgttaacctgcaggaacttgtttatttgaaaatcaattcacaaaatccgagtagttattttgcctcccccttcccatttaacagaatacaccaatctctccccacgcacagctttaaacatttggataccattagatatagacatggttttagattccacattccaaacagtttcagagcgagccaatctggggtcagtgatagataaaaatccatcgggatagtcttttaaagcgctttcacagtccaactgctgcggatgcgactccggagtctggatcacggtcatctggaagaagaacgatgggaatcataatccgaaaacggtatcggacgattgtgtctcatcaaacccacaagcagccgctgtctgcgtcgctccgtgcgactgctgtttatgggatcagggtccacagtgtcctgaagcatgattttaatagcccttaacatcaactttctggtgcgatgcgcgcagcaacgcattctgatttcactcaaatctttgcagtaggtacaacacattattacaatattgtttaataaaccataattaaaagcgctccagccaaaactcatatctgatataatcgcccctgcatgaccatcataccaaagtttaatataaattaaatgacgttccctcaaaaacacactacccacatacatgatctcttttggcatgtgcatattaacaatctgtctgtaccatggacaacgttggttaatcatgcaacccaatataaccttccggaaccacactgccaacaccgctcccccagccatgcattgaagtgaaccctgctgattacaatgacaatgaagaacccaattctctcgaccgtgaatcacttgagaatgaaaaatatctatagtggcacaacatagacataaatgcatgcatcttctcataatttttaactcctcaggatttagaaacatatcccagggaataggaagctcttgcagaacagtaaagctggcagaacaaggaagaccacgaacacaacttacactatgcatagtcatagtatcacaatctggcaacagcgggtggtcttcagtcatagaagctcgggtttcattttcctcacaacgtggtaactgggctctggtgtaagggtgatgtctggcgcatgatgtcgagcgtgcgcgcaaccttgtcataatggagttgcttcctgacattctcgtattttgtatagcaaaacgcggccctggcagaacacactcttcttcgccttctatcctgccgcttagcgtgttccgtgtgatagttcaagtacaaccacactcttaagttggtcaaaagaatgctggcttcagttgtaatcaaaactccatcgcatctaatcgttctgaggaaatcatccaagcaatgcaactggattgtgtttcaagcaggagaggagagggaagagacggaagaaccatgttaatttttattccaaacgatctcgcagtacttcaaattgtagatcgcgcagatggcatctctcgcccccactgtgttggtgaaaaagcacagctagatcaaaagaaatgcgattttcaaggtgctcaacggtggcttccagcaaagcctccacgcgcacatccaagaacaaaagaataccaaaagaaggagcattttctaactcctcaatcatcatattacattcctgcaccattcccagataattttcagctttccagccttgaattattcgtgtcagttcttgtggtaaatccaatccacacattacaaacaggtcccggagggcgccctccaccaccattcttaaacacaccctcataatgacaaaatatcttgctcctgtgtcacctgtagcgaattgagaatggcaacatcaattgacatgcccttggctctaagttcttctttaagttctagttgtaaaaactctctcatattatcaccaaactgcttagccagaagccccccgggaacaagagcaggggacgctacagtgcagtacaagcgcagacctccccaattggctccagcaaaaacaagattggaataagcatattgggaaccgccagtaatatcatcgaagttgctggaaatataatcaggcagagtttcttgtaaaaattgaataaaagaaaaatttgccaaaaaaacattcaaaacctctgggatgcaaatgcaataggttaccgcgctgcgctccaacattgttagttttgaattagtctgcaaaaataaaaaaaaaaacaagcgtcatatcatagtagcctgacgaacagatggataaatcagtctttccatcacaagacaagccacagggtctccagctcgaccctcgtaaaacctgtcatcatgattaaacaacagcaccgaaagttcctcgcggtgaccagcatgaataattcttgatgaagcatacaatccagacatgttagcatcagttaacgagaaaaaacagccaacatagcctttgggtataattatgcttaatcgtaagtatagcaaagccacccctcgcggatacaaagtaaaaggcacaggagaataaaaaatataattatttctctgctgctgttcaggcaacgtcgcccccggtccctctaaatacacatacaaagcctcatcagccatggcttaccagacaaagtacagcgggcacacaaagcacaagctctaaagtgactctccaacctctccacaatatatatatacacaagccctaaactgacgtaatgggagtaaagtgtaaaaaatcccgccaaacccaacacacaccccgaaactgcgtcaccagggaaaagtacagtttcacttccgcaatcccaacaggcgtaacttcctctttctcacggtacgtgatatcccactaacttgcaacgtcattttcccacggtcgcaccgccccttttagccgttaaccccacagccaatcaccacacgatccacactttttaaaatcacctcatttacatattggcaccattccatctataaggtatattatatagataga

SEQ ID NO: 4 - DNA, 34754 bp, Artificial Sequence
  A virus genome sequence consisting of a transgene cassette that encodes an anti-VEGF full length antibody inserted in the region BY.
tctatctatataatataccttatagatggaatggtgccaatatgtaaatgaggtgattttaaaaagtgtggatcgtgtggtgattggctgtggggttaacggctaaaaggggcggtgcgaccgtgggaaaatgacgttttgtgggggtggagtttttttgcaagttgtcgcgggaaatgtgacgcataaaaaggcttttttctcacggaactacttagttttcccacggtatttaacaggaaatgaggtagttttgaccggatgcaagtgaaaattgttgattttcgcgcgaaaactgaatgaggaagtgtttttctgaataatgtggtatttatggcagggtggagtatttgttcagggccaggtagactttgacccattacgtggaggtttcgattaccgtgttttttacctgaatttccgcgtaccgtgtcaaagtcttctgtttttacgtaggtgtcagctgatcgctagggtatttatacctcagggtttgtgtcaagaggccactcttgagtgccagcgagaagagttttctcctctgcgccggcagtttaataataaaaaaatgagagatttgcgatttctgcctcaggaaataatctctgctgagactggaaatgaaatattggagcttgtggtgcacgccctgatgggagacgatccggagccacctgtgcagctttttgagcctcctacgcttcaggaactgtatgatttagaggtagagggatcggaggattctaatgaggaagctgtaaatggcttttttaccgattctatgcttttagctgctaatgaagggttagaattagatccgcctttggacacttttgatactccaggggtaattgtggaaagcggtacaggtgtaagaaaattacctgatttgagttccgtggactgtgatttgcactgctatgaagacgggtttcctccgagtgatgaggaggaccatgaaaaggagcagtccatgcagactgcagcgggtgagggagtgaaggctgccaatgttggttttcagttggattgcccggagcttcctggacatggctgtaagtcttgtgaatttcacaggaaaaatactggagtaaaggaactgttatgttcgctttgttatatgagaacgcactgccactttatttacagtaagtgtgtttaagttaaaatttaaaggaatatgctgtttttcacatgtatattgagtgtgagttttgtgcttcttattataggtcctgtgtctgatgctgatgaatcaccatctcctgattctactacctcacctcctgagattcaagcacctgttcctgtggacgtgcgcaagcccattcctgtgaagcttaagcctgggaaacgtccagcagtggaaaaacttgaggacttgttacagggtggggacggacctttggacttgagtacacggaaacgtccaagacaataagtgttccatatccgtgtttacttaaggtgacgtcaatatttgtgtgacagtgcaatgtaataaaaatatgttaactgttcactggtttttattgctttttgggcggggactcaggtatataagtagaagcagacctgtgtggttagctcataggagctggctttcatccatggaggtttgggccattttggaagaccttaggaagactaggcaactgttagagaacgcttcggacggagtctccggtttttggagattctggttcgctagtgaattagctagggtagtttttaggataaaacaggactataaacaagaatttgaaaagttgttggtagattgcccaggactttttgaagctcttaatttgggccatcaggttcactttaaagaaaaagttttatcagttttagacttttcaaccccaggtagaactgctgctgctgtggcttttcttacttttatattagataaatggatcccgcagactcatttcagcaggggatacgttttggatttcatagccacagcattgtggagaacatggaaggttcgcaagatgaggacaatcttaggttactggccagtgcagcctttgggtgtagcgggaatcctgaggcatccaccggtcatgccagcggttctggaggaggaacagcaagaggacaacccgagagccggcctggaccctccagtggaggaggcggagtagctgacttgtctcctgaactgcaacgggtgcttactggatctacgtccactggacgggataggggcgttaagagggagagggcatctagtggtactgatgctagatctgagttggctttaagtttaatgagtcgcagacgtcctgaaaccatttggtggcatgaggttcagaaagagggaagggatgaagtttctgtattgcaggagaaatattcactggaacaggtgaaaacatgttggttggagcctgaggatgattgggaggtggccattaaaaattatgccaagatagctttgaggcctgataaacagtataagattactagacggattaatatccggaatgcttgttacatatctggaaatggggctgaggtggtaatagatactcaagacaaggcagttattagatgctgcatgatggatatgtggcctggggtagtcggtatggaagcagtaacttttgtaaatgttaagtttaggggagatggttataatggaatagtgtttatggccaataccaaacttatattgcatggttgtagcttttttggtttcaacaatacctgtgtagatgcctggggacaggttagtgtacggggatgtagtttctatgcgtgttggattgccacagctggcagaaccaagagtcaattgtctctgaagaaatgcatatttcaaagatgtaacctgggcattctgaatgaaggcgaagcaagggtccgccactgcgcttctacagatactggatgttttattttgattaagggaaatgccagcgtaaagcataacatgatttgcggtgcttccgatgagaggccttatcaaatgctcacttgtgctggtgggcattgtaatatgctggctactgtgcatattgtttcccatcaacgcaaaaaatggcctgtttttgatcacaatgtgatgacgaagtgtaccatgcatgcaggtgggcgtagaggaatgtttatgccttaccagtgtaacatgaatcatgtgaaagtgttgttggaaccagatgccttttccagaatgagcctaacaggaatttttgacatgaacatgcaaatctggaagatcctgaggtatgatgatacgagatcgagggtacgcgcatgcgaatgcggaggcaagcatgccaggttccagccggtgtgtgtagatgtgactgaagatctcagaccggatcatttggttattgcccgcactggagcagagttcggatccagtggagaagaaactgactaaggtgagtattgggaaaactttggggtgggattttcagatggacagattgagtaaaaatttgttttttctgtcttgcagctgtcatgagtggaaacgcttcttttaaggggggagtcttcagcccttatctgacagggcgtctcccatcctgggcaggagttcgtcagaatgttatgggatctactgtggatggaagacccgtccaacccgccaattcttcaacgctgacctatgctactttaagttcttcacctttggacgcagctgcagctgccgccgccgcttctgttgccgctaacactgtgcttggaatgggttactatggaagcatcatggctaattccacttcctctaataacccttctaccctgactcaggacaagttacttgtccttttggcccagctggaggctttgacccaacgtctgggtgaactttctcagcaggtggtcgagttgcgagtacaaactgagtctgctgtcggcacggcaaagtctaaataaaaaaatcccagaatcaatgaataaataaacaagcttgttgttgatttaaaatcaagtgtttttatttcatttttcgcgcacggtatgccctagaccaccgatctctatcattgagaactcggtggattttttccaggatcctatagaggtgggattgaatgtttagatacatgggcattaggccgtctttggggtggagatagctccattgaagggattcatgctccggggtagtgttgtaaatcacccagtcataacaaggtcgcagtgcatggtgttgcacaatatcttttagaagtaggctgattgccacagataagcccttggtgtaggtgtttacaaaccggttgagctgggatgggtgcattcggggtgaaattatgtgcattttggattggatttttaagttggcaatattgccgccaagatcccgtcttgggttcatgttatgaaggaccaccaagacggtgtatccggtacatttaggaaatttatcgtgcagcttggatggaaaagcgtggaaaaatttggagacacccttgtgtcctccaagattttccatgcactcatccatgataatagcaatggggccgtgggcagcggcgcgggcaaacacgttccgtgggtctgacacatcatagttatgttcctgagttaaatcatcataagccattttaatgaatttggggcggagagtaccagattggggtatgaatgttccttcgggccccggagcatagttcccctcacagatttgcatttcccaagctttcagttccgagggtggaatcatgtccacctggggggctatgaaaaacaccgtttctggggcgggggtgattaattgtgatgatagcaaatttctgagcaattgagatttgccacatccggtggggccataaatgattccgattacgggttgcaggtggtagtttagggaacggcaactgccgtcttctcgaagcaagggggccacctcgttcatcatttcccttacatgcatattttcccgcaccaaatccattaggaggcgctctcctcctagtgatagaagttcttgtagtgaggaaaagtttttcagcggtttcagaccgtcagccatgggcattttggagagagtttgctgcaaaagttctagtctgttccacagttcagtgatgtgttctatggcatctcgatccagcagacctcctcgtttcgcgggtttggacggctcctggaatagggtatgagacgatgggcgtccagcgctgccagggttcggtccttccagggtctcagtgttcgagtcagggttgtttccgtcacagtgaaggggtgtgcgcctgcttgggcgcttgccagggtgcgcttcagactcatcctgctggtcgaaaacttctgtcgcttggcgccctgtatgtcggccaagtagcagtttaccatgagttcgtagttgagcgcctcggctgcgtggcctttggcgcggagcttacctttggaagttttcttgcataccgggcagtataggcatttcagcgcatacaacttgggcgcaaggaaaacggattctggggagtatgcatctgcgccgcaggaggcgcaaacagtttcacattccaccagccaggttaaatccggttcattggggtcaaaaacaagttttccgccatattttttgatgcgtttcttacctttggtctccatgagttcgtgtcctcgttgagtgacaaacaggctgtccgtgtccccgtagactgattttacaggcctcttctccagtggagtgcctcggtcttcttcgtacaggaactctgaccactctgatacaaaggcgcgcgtccaggccagcacaaaggaggctatgtgggaggggtagcgatcgttgtcaaccagggggtccaccttttccaaagtatgcaaacacatgtcaccctcttcaacatccaggaatgtgattggcttgtaggtgtatttcacgtgacctggggtccccgctgggggggtataaaagggggcggttctttgctcttcctcactgtcttccggatcgctgtccaggaacgtcagctgttggggtaggtattccctctcgaaggcgggcatgacctctgcactcaggttgtcagtttctaagaacgaggaggatttgatattgacagtgccggttgagatgcctttcatgaggttttcgtccatctggtcagaaaacacaatttttttattgtcaagtttggtggcaaatgatccatacagggcgttggataaaagtttggcaatggatcgcatggtttggttcttttccttgtccgcgcgctctttggcggcgatgttgagttggacatactcgcgtgccaggcacttccattcggggaagatagttgttaattcatctggcacgattctcacttgccaccctcgattatgcaaggtaattaaatccacactggtggccacctcgcctcgaaggggttcattggtccaacagagcctacctcctttcctagaacagaaagggggaagtgggtctagcataagttcatcgggagggtctgcatccatggtaaagattcccggaagtaaatccttatcaaaatagctgatgggagtggggtcatctaaggccatttgccattctcgagctgccagtgcgcgctcatatgggttaaggggactgccccatggcatgggatgggtgagtgcagaggcatacatgccacagatgtcatagacgtagatgggatcctcaaagatgcctatgtaggttggatagcatcgcccccctctgatacttgctcgcacatagtcatatagttcatgtgatggcgctagcagccccggacccaagttggtgcgattgggtttttctgttctgtagacgatctggcgaaagatggcgtgagaattggaagagatggtgggtctttgaaaaatgttgaaatgggcatgaggtagacctacagagtctctgacaaagtgggcataagattcttgaagcttggttaccagttcggcggtgacaagtacgtctagggcgcagtagtcaagtgtttcttgaatgatgtcataacctggttggtttttcttttcccacagttcgcggttgagaaggtattcttcgcgatccttccagtactcttctagcggaaacccgtctttgtctgcacggtaagatcctagcatgtagaactgattaactgccttgtaagggcagcagcccttctctacgggtagagagtatgcttgagcagcttttcgtagcgaagcgtgagtaagggcaaaggtgtctctgaccatgactttgaggaattggtatttgaagtcgatgtcgtcacaggctccctgttcccagagttggaagtctacccgtttcttgtaggcggggttgggcaaagcgaaagtaacatcattgaagagaatcttgccggccctgggcatgaaattgcgagtgatgcgaaaaggctgtggtacttccgctcggttattgataacctgggcagctaggacgatctcgtcgaaaccgttgatgttgtgtcctacgatgtataattctatgaaacgcggcgtgcctctgacgtgaggtagcttactgagctcatcaaaggttaggtctgtggggtcagataaggcgtagtgttcgagagcccattcgtgcaggtgaggattcgctttaaggaaggaggaccagaggtccactgccagtgctgtttgtaactggtcccggtactgacgaaaatgccgtccgactgccattttttctggggtgacgcaatagaaggtttgggggtcctgccgccagcgatcccacttgagttttatggcgaggtcataggcgatgttgacgagccgctggtctccagagagtttcatgaccagcatgaaggggattagctgcttgccaaaggaccccatccaggtgtaggtttccacatcgtaggtgagaaagagcctttctgtgcgaggatgagagccaatcgggaagaactggatctcctgccaccagttggaggaatggctgttgatgtgatggaagtagaactccctgcgacgcgccgagcattcatgcttgtgcttgtacagacggccgcagtagtcgcagcgttgcacgggttgtatctcgtgaatgagttgtacctggcttcccttgacgagaaatttcagtgggaagccgaggcctggcgattgtatctcgtgctttactatgttgtctgcatcggcctgttcatcttctgtctcgatggtggtcatgctgacgagccctcgcgggaggcaagtccagacctcggcgcggcaggggcggagctcgaggacgagagcgcgcaggctggagctgtccagggtcctgagacgctgcggactcaggttagtaggcagtgtcaggagattaacttgcatgatcttttggagggcgtgcgggaggttcagatagtacttgatctcaacgggtccgttggtggagatgtcgatggcttgcagggttccgtgtcccttgggcgctaccaccgtgcccttgtttttcattttggacggcggtggctctgttgcttcttgcatgtttagaagcggtgtcgagggcgcgcaccgggcggcaggggcggctcgggacccggcggcatggctggcagtggtacgtcggcgccgcgcgcgggtaggttctggtactgcgccctgagaagactcgcatgcgcgacgacgcggcggttgacatcctggatctgacgcctctgggtgaaagctaccggccccgtgagcttgaacctgaaagagagttcaacagaatcaatctcggtatcgttgacggcggcttgcctaaggatttcttgcacgtcaccagagttgtcctggtaggcgatctccgccatgaactgctcgatctcttcctcttgaagatctccgcggcccgctctctcgacggtggccgcgaggtcgttggagatgcgcccaatgagttgagagaatgcattcatgcccgcctcgttccagacgcggctgtagaccacggcccccacgggatctctcgcgcgcatgaccacctgggcgaggttgagctccacgtggcgggtgaagaccgcatagttgcataggcgctggaaaaggtagttgagtgtggtggcgatgtgctcggtgacgaagaaatacatgatccatcgtctcagcggcatctcgctgacatcgcccagagcttccaagcgctccatggcctcgtagaagtccacggcaaaattaaaaaactgggagtttcgcgcggacacggtcaactcctcttccagaagacggataagttcggcgatggtggtgcgcacctcgcgctcgaaagcccctgggatttcttcctcaatctcttcttcttccactaacatctcttcctcttcaggtggggctgcaggaggagggggaacgcggcgacgccggcggcgcacgggcagacggtcgatgaatctttcaatgacctctccgcggcggcggcgcatggtttcagtgacggcgcggccgttctcgcgcggtcgcagagtaaaaacaccgccgcgcatctccttaaagtggtgactgggaggttctccgtttgggagggagagggcgctgattatacattttattaattggcccgtagggactgcacgcagagatctgatcgtgtcaagatccacgggatctgaaaacctttcgacgaaagcgtctaaccagtcacagtcacaaggtaggctgagtacggcttcttgtgggcgggggtggttatgtgttcggtctgggtcttctgtttcttcttcatctcgggaaggtgagacgatgctgctggtgatgaaattaaagtaggcagttctaagacggcggatggtggcgaggagcaccaggtctttgggtccggcttgctggatacgcaggcgattggccattccccaagcattatcctgacatctagcaagatctttgtagtagtcttgcatgagccgttctacgggcacttcttcctcacccgttctgccatgcatacgtgtgagtccaaatccgcgcattggttgtaccagtgccaagtcagctacgactctttcggcgaggatggcttgctgtacttgggtaagggtggcttgaaagtcatcaaaatccacaaagcggtggtaagctcctgtattaatggtgtaagcacagttggccatgactgaccagttaactgtctggtgaccagggcgcacgagctcggtgtatttaaggcgcgaataggcgcgggtgtcaaagatgtaatcgttgcaggtgcgcaccagatactggtaccctataagaaaatgcggcggtggttggcggtagagaggccatcgttctgtagctggagcgccaggggcgaggtcttccaacataaggcggtgatagccgtagatgtacctggacatccaggtgattcctgcggcggtagtagaagcccgaggaaactcgcgtacgcggttccaaatgttgcgtagcggcatgaagtagttcattgtaggcacggtttgaccagtgaggcgcgcgcagtcattgatgctctatagacacggagaaaatgaaagcgttcagcgactcgactccgtagcctggaggaacgtgaacgggttgggtcgcggtgtaccccggttcgagacttgtactcgagccggccggagccgcggctaacgtggtattggcactcccgtctcgacccagcctacaaaaatccaggatacggaatcgagtcgttttgctggtttccgaatggcagggaagtgagtcctattttttttttttgccgctcagatgcatcccgtgctgcgacagatgcgcccccaacaacagcccccctcgcagcagcagcagcagcaatcacaaaaggctgtccctgcaactactgcaactgccgccgtgagcggtgcgggacagcccgcctatgatctggacttggaagagggcgaaggactggcacgtctaggtgcgccttcacccgagcggcatccgcgagttcaactgaaaaaagattctcgcgaggcgtatgtgccccaacagaacctatttagagacagaagcggcgaggagccggaggagatgcgagcttcccgctttaacgcgggtcgtgagctgcgtcacggtttggaccgaagacgagtgttgcgggacgaggatttcgaagttgatgaaatgacagggatcagtcctgccagggcacacgtggctgcagccaaccttgtatcggcttacgagcagacagtaaaggaagagcgtaacttccaaaagtcttttaataatcatgtgcgaaccctgattgcccgcgaagaagttacccttggtttgatgcatttgtgggatttgatggaagctatcattcagaaccctactagcaaacctctgaccgcccagctgtttctggtggtgcaacacagcagagacaatgaggctttcagagaggcgctgctgaacatcaccgaacccgaggggagatggttgtatgatcttatcaacattctacagagtatcatagtgcaggagcggagcctgggcctggccgagaaggtggctgccatcaattactcggttttgagcttgggaaaatattacgctcgcaaaatctacaagactccatacgttcccatagacaaggaggtgaagatagatgggttctacatgcgcatgacgctcaaggtcttgaccctgagcgatgatcttggggtgtatcgcaatgacagaatgcatcgcgcggttagcgccagcaggaggcgcgagttaagcgacagggaactgatgcacagtttgcaaagagctctgactggagctggaaccgagggtgagaattacttcgacatgggagctgacttgcagtggcagcctagtcgcagggctctgagcgccgcgacggcaggatgtgagcttccttacatagaagaggcggatgaaggcgaggaggaagagggcgagtacttggaagactgatggcacaacccgtgttttttgctagatggaacagcaagcaccggatcccgcaatgcgggcggcgctgcagagccagccgtccggcattaactcctcggacgattggacccaggccatgcaacgtatcatggcgttgacgactcgcaaccccgaagcctttagacagcaaccccaggccaaccgtctatcggccatcatggaagctgtagtgccttcccgctctaatcccactcatgagaaggtcctggccatcgtgaacgcgttggtggagaacaaagctattcgtccagatgaggccggactggtatacaacgctctcttagaacgcgtggctcgctacaacagtagcaatgtgcaaaccaatttggaccgtatgataacagatgtacgcgaagccgtgtctcagcgcgaaaggttccagcgtgatgccaacctgggttcgctggtggcgttaaatgctttcttgagtactcagcctgctaatgtgccgcgtggtcaacaggattatactaactttttaagtgctttgagactgatggtatcagaagtacctcagagcgaagtgtatcagtccggtcctgattacttctttcagactagcagacagggcttgcagacggtaaatctgagccaagcttttaaaaaccttaaaggtttgtggggagtgcatgccccggtaggagaaagagcaaccgtgtctagcttgttaactccgaactcccgcctattattactgttggtagctcctttcaccgacagcggtagcatcgaccgtaattcctatttgggttacctactaaacctgtatcgcgaagccatagggcaaagtcaggtggacgagcagacctatcaagaaattacccaagtcagtcgcgctttgggacaggaagacactggcagtttggaagccactctgaacttcttgcttaccaatcggtctcaaaagatccctcctcaatatgctcttactgcggaggaggagaggatccttagatatgtgcagcagagcgtgggattgtttctgatgcaagagggggcaactccgactgcagcactggacatgacagcgcgaaatatggagcccagcatgtatgccagtaaccgacctttcattaacaaactgctggactacttgcacagagctgccgctatgaactctgattatttcaccaatgccatcttaaacccgcactggctgcccccacctggtttctacacgggcgaatatgacatgcccgaccctaatgacggatttctgtgggacgacgtggacagcgatgttttttcacctctttctgatcatcgcacgtggaaaaaggaaggcggcgatagaatgcattcttctgcatcgctgtccggggtcatgggtgctaccgcggctgagcccgagtctgcaagtccttttcctagtctacccttttctctacacagtgtacgtagcagcgaagtgggtagaataagtcgcccgagtttaatgggcgaagaggagtatctaaacgattccttgctcagaccggcaagagaaaaaaatttcccaaacaatggaatagaaagtttggtggataaaatgagtagatggaagacttatgctcaggatcacagagacgagcctgggatcatggggattacaagtagagcgagccgtagacgccagcgccatgacagacagaggggtcttgtgtgggacgatgaggattcggccgatgatagcagcgtgctggacttgggtgggagaggaaggggcaacccgtttgctcatttgcgccctcgcttgggtggtatgttgtaaaaaaaaataaaaaaaaaactcaccaaggccatggcgacgagcgtacgttcgttcttctttattatctgtgtctagtataatgaggcgagtcgtgctaggcggagcggtggtgtatccggagggtcctcctccttcgtacgagagcgtgatgcagcagcagcaggcgacggcggtgatgcaatccccactggaggctccctttgtgcctccgcgatacctggcacctacggagggcagaaacagcattcgttattcggaactggcacctcagtacgataccaccaggttgtatctggtggacaacaagtcggcggacattgcttctctgaactatcagaatgaccacagcaacttcttgaccacggtggtgcaaaacaatgactttacccctacggaagccagcacccagaccattaactttgatgaacgatcgcggtggggcggtcagctaaagaccatcatgcatactaacatgccaaacgtgaacgagtatatgtttagtaacaagttcaaagcgcgtgtgatggtgtccagaaaacctcccgacggtgctgcagttggggatacttatgatcacaagcaggatattttgaaatatgagtggttcgagtttactttgccagaaggcaacttttcagttactatgactattgatttgatgaacaatgccatcatagataattacttgaaagtgggtagacagaatggagtgcttgaaagtgacattggtgttaagttcgacaccaggaacttcaagctgggatgggatcccgaaaccaagttgatcatgcctggagtgtatacgtatgaagccttccatcctgacattgtcttactgcctggctgcggagtggattttaccgagagtcgtttgagcaaccttcttggtatcagaaaaaaacagccatttcaagagggttttaagattttgtatgaagatttagaaggtggtaatattccggccctcttggatgtagatgcctatgagaacagtaagaaagaacaaaaagccaaaatagaagctgctacagctgctgcagaagctaaggcaaacatagttgccagcgactctacaagggttgctaacgctggagaggtcagaggagacaattttgcgccaacacctgttccgactgcagaatcattattggccgatgtgtctgaaggaacggacgtgaaactcactattcaacctgtagaaaaagatagtaagaatagaagctataatgtgttggaagacaaaatcaacacagcctatcgcagttggtatctttcgtacaattatggcgatcccgaaaaaggagtgcgttcctggacattgctcaccacctcagatgtcacctgcggagcagagcaggtctactggtcgcttccagacatgatgaaggatcctgtcactttccgctccactagacaagtcagtaactaccctgtggtgggtgcagagcttatgcccgtcttctcaaagagcttctacaacgaacaagctgtgtactcccagcagctccgccagtccacctcgcttacgcacgtcttcaaccgctttcctgagaaccagattttaatccgtccgccggcgcccaccattaccaccgtcagtgaaaacgttcctgctctcacagatcacgggaccctgccgttgcgcagcagtatccggggagtccaacgtgtgaccgttactgacgccagacgccgcacctgtccctacgtgtacaaggcactgggcatagtcgcaccgcgcgtcctttcaagccgcactttctaaaaaaaaaaaaaatgtccattcttatctcgcccagtaataacaccggttggggtctgcgcgctccaagcaagatgtacggaggcgcacgcaaacgttctacccaacatcctgtccgtgttcgcggacattttcgcgctccatggggcgccctcaagggccgcactcgcgttcgaaccaccgtcgatgatgtaatcgatcaggtggttgccgacgcccgtaattatactcctactgcgcctacatctactgtggatgcagttattgacagtgtagtggctgacgctcgcaactatgctcgacgtaagagccggcgaaggcgcattgccagacgccaccgagctaccactgccatgcgagccgcaagagctctgctacgaagagctagacgcgtggggcgaagagccatgcttagggcggccagacgtgcagcttcgggcgccagcgccggcaggtcccgcaggcaagcagccgctgtcgcagcggcgactattgccgacatggcccaatcgcgaagaggcaatgtatactgggtgcgtgacgctgccaccggtcaacgtgtacccgtgcgcacccgtccccctcgcacttagaagatactgagcagtctccgatgttgtgtcccagcggcgaggatgtccaagcgcaaatacaaggaagaaatgctgcaggttatcgcacctgaagtctacggccaaccgttgaaggatgaaaaaaaaccccgcaaaatcaagcgggttaaaaaggacaaaaaagaagaggaagatggcgatgatgggctggcggagtttgtgcgcgagtttgccccacggcgacgcgtgcaatggcgtgggcgcaaagttcgacatgtgttgagacctggaacttcggtggtctttacacccggcgagcgttcaagcgctacttttaagcgttcctatgatgaggtgtacggggatgatgatattcttgagcaggcggctgaccgattaggcgagtttgcttatggcaagcgtagtagaataacttccaaggatgagacagtgtcgatacccttggatcatggaaatcccacccctagtcttaaaccggtcactttgcagcaagtgttacccgtaactccgcgaacaggtgttaaacgcgaaggtgaagatttgtatcccactatgcaactgatggtacccaaacgccagaagttggaggacgttttggagaaagtaaaagtggatccagatattcaacctgaggttaaagtgagacccattaagcaggtagcgcctggtctgggggtacaaactgtagacattaagattcccactgaaagtatggaagtgcaaactgaacccgcaaagcctactgccacctccactgaagtgcaaacggatccatggatgcccatgcctattacaactgacgccgccggtcccactcgaagatcccgacgaaagtacggtccagcaagtctgttgatgcccaattatgttgtacacccatctattattcctactcctggttaccgaggcactcgctactatcgcagccgaaacagtacctcccgccgtcgccgcaagacacctgcaaatcgcagtcgtcgccgtagacgcacaagcaaaccgactcccggcgccctggtgcggcaagtgtaccgcaatggtagtgcggaacctttgacactgccgcgtgcgcgttaccatccgagtatcatcacttaatcaatgttgccgctgcctccttgcagatatggccctcacttgtcgccttcgcgttcccatcactggttaccgaggaagaaactcgcgccgtagaagagggatgttgggacgcggaatgcgacgctacaggcgacggcgtgctatccgcaagcaattgcggggtggttttttaccagccttaattccaattatcgctgctgcaattggcgcgataccaggcatagcttccgtggcggttcaggcctcgcaacgacattgacattggaaaaaaacgtataaataaaaaaaaaaaaatacaatggactctgacactcctggtcctgtgactatgttttcttagagatggaagacatcaatttttcatccttggctccgcgacacggcacgaagccgtacatgggcacctggagcgacatcggcacgagccaactgaacgggggcgccttcaattggagcagtatctggagcgggcttaaaaattttggctcaaccataaaaacatacgggaacaaagcttggaacagcagtacaggacaggcgcttagaaataaacttaaagaccagaacttccaacaaaaagtagtcgatgggatagcttccggcatcaatggagtggtagatttggctaaccaggctgtgcagaaaaagataaacagtcgtttggacccgccgccagcaaccccaggtgaaatgcaagtggaggaagaaattcctccgccagaaaaacgaggcgacaagcgtccgcgtcccgatttggaagagacgctggtgacgcgcgtagatgaaccgccttcttatgaggaagcaacgaagcttggaatgcccaccactagaccgatagccccaatggccaccggggtgatgaaaccttctcagttgcatcgacccgtcaccttggatttgccccctccccctgctgctactgctgtacccgcttctaagcctgtcgctgccccgaaaccagtcgccgtagccaggtcacgtcccgggggcgctcctcgtccaaatgcgcactggcaaaatactctgaacagcatcgtgggtctaggcgtgcaaagtgtaaaacgccgtcgctgcttttaattaaatatggagtagcgcttaacttgcctatctgtgtatatgtgtcattacacgccgtcacagcagcagaggaaaaaaggaagaggtcgtgcgtcgacgctgagttactttcaagatggccaccccatcgatgctgccccaatgggcatacatgcacatcgccggacaggatgcttcggagtacctgagtccgggtctggtgcagttcgcccgcgccacagacacctacttcaatctgggaaataagtttagaaatcccaccgtagcgccgacccacgatgtgaccaccgaccgtagccagcggctcatgttgcgcttcgtgcccgttgaccgggaggacaatacatactcttacaaagtgcggtacaccctggccgtgggcgacaacagagtgctggatatggccagcacgttctttgacattaggggtgtgttggacagaggtcccagtttcaaaccctattctggtacggcttacaactccctggctcctaaaggcgctccaaatacatctcagtggattgcagaaggtgtaaaaaatacaactggtgaggaacacgtaacagaagaggaaaccaatactactacttacacttttggcaatgctcctgtaaaagctgaagctgaaattacaaaagaaggactcccagtaggtttggaagtttcagatgaagaaagtaaaccgatttatgctgataaaacatatcagccagaacctcagctgggagatgaaacttggactgaccttgatggaaaaaccgaaaagtatggaggcagggctctcaaacccgatactaagatgaaaccatgctacgggtcctttgccaaacctactaatgtgaaaggcggtcaggcaaaacaaaaaacaacggagcagccaaatcagaaagtcgaatatgatatcgacatggagttttttgatgcggcatcgcagaaaacaaacttaagtcctaaaattgtcatgtatgcagaaaatgtaaatttggaaactccagacactcatgtagtgtacaaacctggaacagaagacacaagttccgaagctaatttgggacaacaatctatgcccaacagacccaactacattggcttcagagataactttattggacttatgtactataacagtactggtaacatgggggtgctggctggtcaagcgtctcagttaaatgcagtggttgacttgcaggacagaaacacagaactttcttaccaactcttgcttgactctctgggcgacagaaccagatactttagcatgtggaatcaggctgtggacagttatgatcctgatgtacgtgttattgaaaatcatggtgtggaagatgaacttcccaactactgttttccactggacggcataggtgttccaacaaccagttacaaatcaatagttccaaatggagacaatgcgcctaattggaaggaacctgaagtaaatggaacaagtgagatcggacagggtaatttgtttgccatggaaattaaccttcaagccaatctatggcgaagtttcctttattccaatgtggctctatatctcccagactcgtacaaatacaccccgtccaatgtcactcttccagaaaacaaaaacacctacgactacatgaacgggcgggtggtgccgccatctctagtagacacctatgtgaacattggtgccaggtggtctctggatgccatggacaatgtcaacccattcaaccaccaccgtaacgctggcttgcgttaccgatccatgcttctgggtaacggacgttatgtgcctttccacatacaagtgcctcaaaaattcttcgctgttaaaaacctgctgcttctcccaggctcctacacttatgagtggaactttaggaaggatgtgaacatggttctacagagttccctcggtaacgacctgcgggtagatggcgccagcatcagtttcacgagcatcaacctctatgctacttttttccccatggctcacaacaccgcttccacccttgaagccatgctgcggaatgacaccaatgatcagtcattcaacgactacctatctgcagctaacatgctctaccccattcctgccaatgcaaccaatattcccatttccattccttctcgcaactgggcggctttcagaggctggtcatttaccagactgaaaaccaaagaaactccctctttggggtctggatttgacccctactttgtctattctggttctattccctacctggatggtaccttctacctgaaccacacttttaagaaggtttccatcatgtttgactcttcagtgagctggcctggaaatgacaggttactatctcctaacgaatttgaaataaagcgcactgtggatggcgaaggctacaacgtagcccaatgcaacatgaccaaagactggttcttggtacagatgctcgccaactacaacatcggctatcagggcttctacattccagaaggatacaaagatcgcatgtattcatttttcagaaacttccagcccatgagcaggcaggtggttgatgaggtcaattacaaagacttcaaggccgtcgccataccctaccaacacaacaactctggctttgtgggttacatggctccgaccatgcgccaaggtcaaccctatcccgctaactatccctatccactcattggaacaactgccgtaaatagtgttacgcagaaaaagttcttgtgtgacagaaccatgtggcgcataccgttctcgagcaacttcatgtctatgggggcccttacagacttgggacagaatatgctctatgccaactcagctcatgctctggacatgacctttgaggtggatcccatggatgagcccaccctgctttatcttctcttcgaagttttcgacgtggtcagagtgcatcagccacaccgcggcatcatcgaggcagtctacctgcgtacaccgttctcggccggtaacgctaccacgtaagaagcttcttgcttcttgcaaatagcagctgcaaccatggcctgcggatcccaaaacggctccagcgagcaagagctcagagccattgtccaagacctgggttgcggaccctattttttgggaacctacgataagcgcttcccggggttcatggcccccgataagctcgcctgtgccattgtaaatacggccggacgtgagacggggggagagcactggttggctttcggttggaacccacgttctaacacctgctacctttttgatccttttggattctcggatgatcgtctcaaacagatttaccagtttgaatatgagggtctcctgcgccgcagcgctcttgctaccaaggaccgctgtattacgctggaaaaatctacccagaccgtgcagggtccccgttctgccgcctgcggacttttctgctgcatgttccttcacgcctttgtgcactggcctgaccgtcccatggacggaaaccccaccatgaaattgctaactggagtgccaaacaacatgcttcattctcctaaagtccagcccaccctgtgtgacaatcaaaaagcactctaccattttcttaatacccattcgccttattttcgctcccatcgtacacacatcgaaagggccactgcgttcgaccgtatggatgttcaataatgactcatgtaaacaacgtgttcaataaacatcactttatttttttacatgtatcaaggctctgcattacttatttatttacaagtcgaatgggttctgacgagaatcagaatgacccgcaggcagtgatacgttgcggaactgatacttgggttgccacttgaattcgggaatcaccaacttgggaaccggtatatcgggcaggatgtcactccacagctttctggtcagctgcaaagctccaagcaggtcaggagccgaaatcttgaaatcacaattaggaccagtgctttgagcgcgagagttgcggtacaccggattgcagcactgaaacaccatcagcgacggatgtctcacgcttgccagcacggtgggatctgcaatcatgcccacatccagatcttcagcattggcaatgctgaacggggtcatcttgcaggtctgcctacccatggcgggcacccaattaggcttgtggttgcaatcgcagtgcagggggatcagtatcatcttggcctgatcctgtctgattcctggatacacggctctcatgaaagcatcatattgcttgaaagcctgctgggctttactaccctcggtataaaacatcccgcaggacctgctcgaaaactggttagctgcacagccggcatcattcacacagcagcgggcgtcattgttagctatttgcaccacacttctgccccagcggttttgggtgattttggttcgctcgggattctcctttaaggctcgttgtccgttctcgctggccacatccatctcgataatctgctccttctgaatcataatattgccatgcaggcacttcagcttgccctcataatcattgcagccatgaggccacaacgcacagcctgtacattcccaattatggtgggcgatctgagaaaaagaatgtatcattccctgcagaaatcttcccatcatcgtgctcagtgtcttgtgactagtgaaagttaactggatgcctcggtgctcctcgtttacgtactggtgacagatgcgcttgtattgttcgtgttgctcaggcattagtttaaaagaggttctaagttcgttatccagcctgtacttctccatcagcagacacatcacttccatgcctttctcccaagcagacaccaggggcaagctaatcggattcttaacagtgcaggcagcagctcctttagccagagggtcatctttagcgatcttctcaatgcttcttttgccatccttctcaacgatgcgcacgggcgggtagctgaaacccactgctacaagttgcgcctcttctctttcttcttcgctgtcttgactgatgtcttgcatggggatatgtttggtcttccttggcttctttttggggggtatcggaggaggaggactgtcgctccgttccggagacagggaggattgtgacgtttcgctcaccattaccaactgactgtcggtagaagaacctgaccccacacggcgacaggtgtttctcttcgggggcagaggtggaggcgattgcgaagggctgcggtccgacctggaaggcggatgactggcagaaccccttccgcgttcgggggtgtgctccctgtggcggtcgcttaactgatttccttcgcggctggccattgtgttctcctaggcagagaaacaacagacatggaaactcagccattgctgtcaacatcgccacgagtgccatcacatctcgtcctcagcgacgaggaaaaggagcagagcttaagcattccaccgcccagtcctgccaccacctctaccctagaagataaggaggtcgacgcatctcatgacatgcagaataaaaaagcgaaagagtctgagacagacatcgagcaagacccgggctatgtgacaccggtggaacacgaggaagagttgaaacgctttctagagagagaggatgaaaactgcccaaaacaacgagcagataactatcaccaagatgctggaaatagggatcagaacaccgactacctcatagggcttgacggggaagacgcgctccttaaacatctagcaagacagtcgctcatagtcaaggatgcattattggacagaactgaagtgcccatcagtgtggaagagctcagccgcgcctacgagcttaacctcttttcacctcgtactccccccaaacgtcagccaaacggcacctgcgagccaaatcctcgcttaaacttttatccagcttttgctgtgccagaagtactggctacctatcacatcttttttaaaaatcaaaaaattccagtctcctgccgcgctaatcgcacccgcgccgatgccctactcaatctgggacctggttcacgcttacctgatatagcttccttggaagaggttccaaagatcttcgagggtctgggcaataatgagactcgggccgcaaatgctctgcaaaagggagaaaatggcatggatgagcatcacagcgttctggtggaattggaaggcgataatgccagactcgcagtactcaagcgaagcatcgaggtcacacacttcgcatatcccgctgtcaacctgccccctaaagtcatgacggcggtcatggaccagttactcattaagcgcgcaagtcccctttcagaagacatgcatgacccagatgcctgtgatgagggtaaaccagtggtcagtgatgagcagctaacccgatggctgggcaccgactctcccagggatttggaagagcgtcgcaagcttatgatggccgtggtgctggttaccgtagaactagagtgtctccgacgtttctttaccgattcagaaaccttgcgcaaactcgaagagaatctgcactacacttttagacacggctttgtgcggcaggcatgcaagatatctaacgtggaactcaccaacctggtttcctacatgggtattctgcatgagaatcgcctaggacaaagcgtgctgcacagcaccctgaagggggaagcccgccgtgattacatccgcgattgtgtctatctgtacctgtgccacacgtggcaaaccggcatgggtgtatggcagcaatgtttagaagaacagaacttgaaagagcttgacaagctcttacagaaatctcttaaggttctgtggacagggttcgacgagcgcaccgtcgcttccgacctggcagacctcatcttcccagagcgtctcagggttactttgcgaaacggattgcctgactttatgagccagagcatgcttaacaattttcgctctttcatcctggaacgctccggtatcctgcccgccacctgctgcgcactgccctccgactttgtgcctctcacctaccgcgagtgccccccgccgctatggagtcactgctacctgttccgtctggccaactatctctcctaccactcggatgtgatcgaggatgtgagcggagacggcttgctggagtgtcactgccgctgcaatctgtgcacgccccaccggtccctagcttgcaacccccagttgatgagcgaaacccagataataggcacctttgaattgcaaggccccagcagccaaggcgatgggtcttctcctgggcaaagtttaaaactgaccccgggactgtggacctccgcctacttgcgcaagtttgctccggaagattaccacccctatgaaatcaagttctatgaggaccaatcacagcctccaaaggccgaactttcggcctgcgtcatcacccagggggcaattctggcccaattgcaagccatccaaaaatcccgccaagaatttctactgaaaaagggtaagggggtctaccttgacccccagaccggcgaggaactcaacacaaggttccctcaggatgtcccaacgacgagaaaacaagaagttgaaggtgcagccgccgcccccagaagatatggaggaagattgggacagtcaggcagaggaggcggaggaggacagtctggaggacagtctggaggaagacagtttggaggaggaaaacgaggaggcagaggaggtggaagaagtaaccgccgacaaacagttatcctcggctgcggagacaagcaacagcgctaccatctccgctccgagtcgaggaacccggcggcgtcccagcagtagatgggacgagaccggacgcttcccgaacccaaccagcgcttccaagaccggtaagaaggatcggcagggatacaagtcctggcgggggcataagaatgccatcatctcctgcttgcatgagtgcgggggcaacatatccttcacgcggcgctacttgctattccaccatggggtgaactttccgcgcaatgttttgcattactaccgtcacctccacagcccctactatagccagcaaatcccggcagtctcgacagataaagacagcggcggcgacctccaacagaaaaccagcagcggcagttagaaaatacacaacaagtgcagcaacaggaggattaaagattacagccaacgagccagcgcaaacccgagagttaagaaatcggatctttccaaccctgtatgccatcttccagcagagtcggggtcaagagcaggaactgaaaataaaaaaccgatctctgcgttcgctcaccagaagttgtttgtatcacaagagcgaagatcaacttcagcgcactctcgaggacgccgaggctctcttcaacaagtactgcgcgctgactcttaaagagtaggcagcgaccgcgcttattcaaaaaaggcgggaattacatcatcctcgacatgagtaaagaaattcccacgccttacatgtggagttatcaaccccaaatgggattggcggcaggcgcctcccaggactactccacccgcatgaattggctcagcgccgggccttctatgatttctcgagttaatgatatacgcgcctaccgaaaccaaatacttttggaacagtcagctcttaccaccacgccccgccaacaccttaatcccagaaattggcccgccgccctagtgtaccaggaaagtcccgctcccaccactgtattacttcctcgagacgcccaggccgaagtccaaatgactaatgcaggtgcgcagttagctggcggctccaccctatgtcgtcacaggcctcggcataatataaaacgcctgatgatcagaggccgaggtatccagctcaacgacgagtcggtgagctctccgcttggtctacgaccagacggaatctttcagattgccggctgcgggagatcttccttcacccctcgtcaggctgttctgactttggaaagttcgtcttcgcaaccccgctcgggcggaatcgggaccgttcaatttgtggaggagtttactccctctgtctacttcaaccccttctccggatctcctgggcattacccggacgagttcataccgaacttcgacgcgattagcgagtcagtggacggctacgattgatgtctggtgacgcggctgagctatctcggctgcgacatctagaccactgccgccgctttcgctgctttgcccgggaactcattgagttcatctacttcgaactccccaaggatcaccctcaaggtccggcccacggagtgcggatttctatcgaaggcaaaatagactctcgcctgcaacgaattttctcccagcggcccgtgctgatcgagcgagaccagggaaacaccacggtttccatctactgcatttgtaatcaccccggattgcatgaaagcctttgctgtcttatgtgtactgagtttaataaaaactgaattaagactctcctacggactgccgcttcttcaacccggattttacaaccagaagaacgaaacttttcctgtcgtccaggactctgttaacttcacctttcctactcacaaactagaagctcaacgactacaccgcttttccagaagcattttccctactaatactactttcaaaaccggaggtgagctccaaggtcttcctacagaaaacccttgggtggaagcgggccttgtagtgctaggaattcttgcgggtgggcttgtgattattctttgctacctatacacaccttgcttcactttcttagtggtgttgtggtattggtttaaaaaatggggcccatactagtcttgcttgttttactttcgcttttggaaccgggttctgccaattacgatccatgtctagacttcgacccagaaaactgcacacttacttttgcacccgacacaagccgcatctgtggagttcatcgcctctcttacgaacttggcccccaacgacaaaaatttacctgcatggtgggaatcaaccccatagttatcacccagcaaagtggagatactaagggttgcattcactgctcctgcgattccatcgagtgcacctacaccctgctgaagaccctatgcggcctaagagacctgctaccaatgaattaaaaaatgattaataaaaaatcacttacttgaaatcagcaataaggtctctgttgaaattttctcccagcagcacctcacttccctcttcccaactctggtattctaaaccccgttcagcggcatactttctccatactttaaaggggatgtcaaattttagctcctctcctgtacccacaatcttcatgtctttcttcccagatgaccaagagagtccggctcagtgactccttcaaccctgtctacccctatgaagatgaaagcacctcccaacacccctttataaacccagggtttatttccccaaatggcttcacacaaagcccaaacggagttcttactttaaaatgtttaaccccactaacaaccacaggcggatctctacagctaaaagtgggagggggacttacagtggatgacaccaacggttttttgaaagaaaacataagtgccaccacaccactcgttaagactggtcactctataggtttaccactaggagccggattgggaacgaatgaaaataaactttgtatcaaattaggacaaggacttacattcaattcaaacaacatttgcattgatgacaatattaacaccttatggacaggagtcaaccccaccgaagccaactgtcaaatcatgaactccagtgaatctaatgattgcaaattaattctaacactagttaaaactggagcactagtcactgcatttgtttatgttataggagtatctaacaattttaatatgctaactacacacagaaatataaattttactgcagagctgtttttcgattctactggtaatttactaactagactctcatccctcaaaactccacttaatcataaatcaggacaaaacatggctactggtgccattactaatgctaaaggtttcatgcccagcacgactgcctatcctttcaatgataattctagagaaaaagaaaactacatttacggaacttgttactacacagctagtgatcgcactgcttttcccattgacatatctgtcatgcttaaccgaagagcaataaatgacgagacatcatattgtattcgtataacttggtcctggaacacaggagatgccccagaggtgcaaacctctgctacaaccctagtcacctccccatttaccttttactacatcagagaagacgactgacaaataaagtttgcgatcgccaggccaccatgggatggagctgtatcatcctcttcttggtagcaacagctacaggtgtccactccgaggttcagctggtggagtctggcggtggcctggtgcagccagggggctcactccgtttgtcctgtgcagcttctggctataccttcaccaactatggtatgaactgggtccgtcaggccccgggtaagggcctggaatgggttggatggattaacacctataccggtgaaccgacctatgctgcggatttcaaacgtcgttttactttttctctggacacctccaagagcacagcttacctgcagatgaacagcctgcgcgctgaggacactgccgtctattactgtgcaaagtacccgcactattatgggagcagccactggtatttcgacgtctggggtcaaggaaccctggtcaccgtctcctcggcctccaccaagggcccatcggtcttccccctggcaccctcctccaagagcacctctgggggcacagcggccctgggctgcctggtcaaggactacttccccgaaccggtgacggtgtcgtggaactcaggcgccctgaccagcggcgtgcacaccttcccggctgtcctacagtcctcaggactctactccctcagcagcgtggtgaccgtgccctccagcagcttgggcacccagacctacatctgcaacgtgaatcacaagcccagcaacaccaaggtcgacaagaaagttgagcccaaatcttgtgacaaaactcacacatgcccaccgtgcccagcacctgagctcctggggggaccgtcagtcttcctcttccccccaaaacccaaggacaccctcatgatctcccggacccctgaggtcacatgcgtggtggtggacgtgagccacgaagaccctgaggtcaagttcaactggtacgtggacggcgtggaggtgcataatgccaagacaaagccgcgggaggagcagtacaacagcacgtaccgtgtggtcagcgtcctcaccgtcctgcaccaggactggctgaatggcaaggagtacaagtgcaaggtctccaacaaagccctcccagcccccatcgagaaaaccatctccaaagccaaagggcagccccgagaaccacaggtgtacaccctgcccccatcccgggaggagatgaccaagaaccaggtcagcctgacctgcctggtcaaaggcttctatcccagcgacatcgccgtggagtgggagagcaatgggcagccggagaacaactacaagaccacgcctcccgtgctggactccgacggctccttcttcctctacagcaagctcaccgtggacaagagcaggtggcagcaggggaacgtcttctcatgctccgtgatgcacgaggctctgcacaaccactacacgcagaagagcctctccctgtctccgggtaaatgatctagactcgagcaggccgacatggactggacctggcgcgtgttttgcctgctcgccgtggctcctggggcccacagcgatatccagatgacccagtccccgagctccctgtccgcctctgtgggcgatagggtcaccatcacctgcagcgcaagtcaggatattagcaactatttaaactggtatcaacagaaaccaggaaaagctccgaaagtcctgatttacttcacctcctctctccactctggagtcccttctcgcttctctggatccggttctgggacggatttcactctgaccatcagcagtctgcagccagaagacttcgcaacttattactgtcaacagtatagcaccgtgccgtggacgtttggacagggtaccaaggtggagatcaaacgaactgtggctgcaccatctgtcttcatcttcccgccatctgatgagcagttgaaatctggaactgcttctgttgtgtgcctgctgaataacttctatcccagagaggccaaagtacagtggaaggtggataacgccctccaatcgggtaactcccaggagagtgtcacagagcaggacagcaaggacagcacctacagcctcagcagcaccctgacgctgagcaaagcagactacgagaaacacaaagtctacgcctgcgaagtcacccatcagggcctgagctcgcccgtcacaaagagcttcaacaggggagagtgttaagctagcttgactgactgagatacagcgtaccttcagctcacagacatgataagatacattgatgagtttggacaaaccacaactagaatgcagtgaaaaaaatgctttatttgtgaaatttgtgatgctattgctttatttgtaaccattataagctgcaataaacaagttaacaacaacaattgcattcattttatgtttcaggttcagggggaggtgtgggaggttttttaaagcaagtaaaacctctacaaatgtggtcctgcaggaacttgtttatttgaaaatcaattcacaaaatccgagtagttattttgcctcccccttcccatttaacagaatacaccaatctctccccacgcacagctttaaacatttggataccattagatatagacatggttttagattccacattccaaacagtttcagagcgagccaatctggggtcagtgatagataaaaatccatcgggatagtcttttaaagcgctttcacagtccaactgctgcggatgcgactccggagtctggatcacggtcatctggaagaagaacgatgggaatcataatccgaaaacggtatcggacgattgtgtctcatcaaacccacaagcagccgctgtctgcgtcgctccgtgcgactgctgtttatgggatcagggtccacagtgtcctgaagcatgattttaatagcccttaacatcaactttctggtgcgatgcgcgcagcaacgcattctgatttcactcaaatctttgcagtaggtacaacacattattacaatattgtttaataaaccataattaaaagcgctccagccaaaactcatatctgatataatcgcccctgcatgaccatcataccaaagtttaatataaattaaatgacgttccctcaaaaacacactacccacatacatgatctcttttggcatgtgcatattaacaatctgtctgtaccatggacaacgttggttaatcatgcaacccaatataaccttccggaaccacactgccaacaccgctcccccagccatgcattgaagtgaaccctgctgattacaatgacaatgaagaacccaattctctcgaccgtgaatcacttgagaatgaaaaatatctatagtggcacaacatagacataaatgcatgcatcttctcataatttttaactcctcaggatttagaaacatatcccagggaataggaagctcttgcagaacagtaaagctggcagaacaaggaagaccacgaacacaacttacactatgcatagtcatagtatcacaatctggcaacagcgggtggtcttcagtcatagaagctcgggtttcattttcctcacaacgtggtaactgggctctggtgtaagggtgatgtctggcgcatgatgtcgagcgtgcgcgcaaccttgtcataatggagttgcttcctgacattctcgtattttgtatagcaaaacgcggccctggcagaacacactcttcttcgccttctatcctgccgcttagcgtgttccgtgtgatagttcaagtacaaccacactcttaagttggtcaaaagaatgctggcttcagttgtaatcaaaactccatcgcatctaatcgttctgaggaaatcatccaagcaatgcaactggattgtgtttcaagcaggagaggagagggaagagacggaagaaccatgttaatttttattccaaacgatctcgcagtacttcaaattgtagatcgcgcagatggcatctctcgcccccactgtgttggtgaaaaagcacagctagatcaaaagaaatgcgattttcaaggtgctcaacggtggcttccagcaaagcctccacgcgcacatccaagaacaaaagaataccaaaagaaggagcattttctaactcctcaatcatcatattacattcctgcaccattcccagataattttcagctttccagccttgaattattcgtgtcagttcttgtggtaaatccaatccacacattacaaacaggtcccggagggcgccctccaccaccattcttaaacacaccctcataatgacaaaatatcttgctcctgtgtcacctgtagcgaattgagaatggcaacatcaattgacatgcccttggctctaagttcttctttaagttctagttgtaaaaactctctcatattatcaccaaactgcttagccagaagccccccgggaacaagagcaggggacgctacagtgcagtacaagcgcagacctccccaattggctccagcaaaaacaagattggaataagcatattgggaaccgccagtaatatcatcgaagttgctggaaatataatcaggcagagtttcttgtaaaaattgaataaaagaaaaatttgccaaaaaaacattcaaaacctctgggatgcaaatgcaataggttaccgcgctgcgctccaacattgttagttttgaattagtctgcaaaaataaaaaaaaaaacaagcgtcatatcatagtagcctgacgaacagatggataaatcagtctttccatcacaagacaagccacagggtctccagctcgaccctcgtaaaacctgtcatcatgattaaacaacagcaccgaaagttcctcgcggtgaccagcatgaataattcttgatgaagcatacaatccagacatgttagcatcagttaacgagaaaaaacagccaacatagcctttgggtataattatgcttaatcgtaagtatagcaaagccacccctcgcggatacaaagtaaaaggcacaggagaataaaaaatataattatttctctgctgctgttcaggcaacgtcgcccccggtccctctaaatacacatacaaagcctcatcagccatggcttaccagacaaagtacagcgggcacacaaagcacaagctctaaagtgactctccaacctctccacaatatatatatacacaagccctaaactgacgtaatgggagtaaagtgtaaaaaatcccgccaaacccaacacacaccccgaaactgcgtcaccagggaaaagtacagtttcacttccgcaatcccaacaggcgtaacttcctctttctcacggtacgtgatatcccactaacttgcaacgtcattttcccacggtcgcaccgccccttttagccgttaaccccacagccaatcaccacacgatccacactttttaaaatcacctcatttacatattggcaccattccatctataaggtatattatatagataga

SEQ ID NO: 5 - DNA, 33442 bp, Artificial Sequence
  NG-74 virus genome sequence
tctatctatataatataccttatagatggaatggtgccaatatgtaaatgaggtgattttaaaaagtgtggatcgtgtggtgattggctgtggggttaacggctaaaaggggcggtgcgaccgtgggaaaatgacgttttgtgggggtggagtttttttgcaagttgtcgcgggaaatgtgacgcataaaaaggcttttttctcacggaactacttagttttcccacggtatttaacaggaaatgaggtagttttgaccggatgcaagtgaaaattgttgattttcgcgcgaaaactgaatgaggaagtgtttttctgaataatgtggtatttatggcagggtggagtatttgttcagggccaggtagactttgacccattacgtggaggtttcgattaccgtgttttttacctgaatttccgcgtaccgtgtcaaagtcttctgtttttacgtaggtgtcagctgatcgctagggtatttatacctcagggtttgtgtcaagaggccactcttgagtgccagcgagaagagttttctcctctgcgccggcagtttaataataaaaaaatgagagatttgcgatttctgcctcaggaaataatctctgctgagactggaaatgaaatattggagcttgtggtgcacgccctgatgggagacgatccggagccacctgtgcagctttttgagcctcctacgcttcaggaactgtatgatttagaggtagagggatcggaggattctaatgaggaagctgtaaatggcttttttaccgattctatgcttttagctgctaatgaagggttagaattagatccgcctttggacacttttgatactccaggggtaattgtggaaagcggtacaggtgtaagaaaattacctgatttgagttccgtggactgtgatttgcactgctatgaagacgggtttcctccgagtgatgaggaggaccatgaaaaggagcagtccatgcagactgcagcgggtgagggagtgaaggctgccaatgttggttttcagttggattgcccggagcttcctggacatggctgtaagtcttgtgaatttcacaggaaaaatactggagtaaaggaactgttatgttcgctttgttatatgagaacgcactgccactttatttacagtaagtgtgtttaagttaaaatttaaaggaatatgctgtttttcacatgtatattgagtgtgagttttgtgcttcttattataggtcctgtgtctgatgctgatgaatcaccatctcctgattctactacctcacctcctgagattcaagcacctgttcctgtggacgtgcgcaagcccattcctgtgaagcttaagcctgggaaacgtccagcagtggaaaaacttgaggacttgttacagggtggggacggacctttggacttgagtacacggaaacgtccaagacaataagtgttccatatccgtgtttacttaaggtgacgtcaatatttgtgtgacagtgcaatgtaataaaaatatgttaactgttcactggtttttattgctttttgggcggggactcaggtatataagtagaagcagacctgtgtggttagctcataggagctggctttcatccatggaggtttgggccattttggaagaccttaggaagactaggcaactgttagagaacgcttcggacggagtctccggtttttggagattctggttcgctagtgaattagctagggtagtttttaggataaaacaggactataaacaagaatttgaaaagttgttggtagattgcccaggactttttgaagctcttaatttgggccatcaggttcactttaaagaaaaagttttatcagttttagacttttcaaccccaggtagaactgctgctgctgtggcttttcttacttttatattagataaatggatcccgcagactcatttcagcaggggatacgttttggatttcatagccacagcattgtggagaacatggaaggttcgcaagatgaggacaatcttaggttactggccagtgcagcctttgggtgtagcgggaatcctgaggcatccaccggtcatgccagcggttctggaggaggaacagcaagaggacaacccgagagccggcctggaccctccagtggaggaggcggagtagctgacttgtctcctgaactgcaacgggtgcttactggatctacgtccactggacgggataggggcgttaagagggagagggcatctagtggtactgatgctagatctgagttggctttaagtttaatgagtcgcagacgtcctgaaaccatttggtggcatgaggttcagaaagagggaagggatgaagtttctgtattgcaggagaaatattcactggaacaggtgaaaacatgttggttggagcctgaggatgattgggaggtggccattaaaaattatgccaagatagctttgaggcctgataaacagtataagattactagacggattaatatccggaatgcttgttacatatctggaaatggggctgaggtggtaatagatactcaagacaaggcagttattagatgctgcatgatggatatgtggcctggggtagtcggtatggaagcagtaacttttgtaaatgttaagtttaggggagatggttataatggaatagtgtttatggccaataccaaacttatattgcatggttgtagcttttttggtttcaacaatacctgtgtagatgcctggggacaggttagtgtacggggatgtagtttctatgcgtgttggattgccacagctggcagaaccaagagtcaattgtctctgaagaaatgcatatttcaaagatgtaacctgggcattctgaatgaaggcgaagcaagggtccgccactgcgcttctacagatactggatgttttattttgattaagggaaatgccagcgtaaagcataacatgatttgcggtgcttccgatgagaggccttatcaaatgctcacttgtgctggtgggcattgtaatatgctggctactgtgcatattgtttcccatcaacgcaaaaaatggcctgtttttgatcacaatgtgatgacgaagtgtaccatgcatgcaggtgggcgtagaggaatgtttatgccttaccagtgtaacatgaatcatgtgaaagtgttgttggaaccagatgccttttccagaatgagcctaacaggaatttttgacatgaacatgcaaatctggaagatcctgaggtatgatgatacgagatcgagggtacgcgcatgcgaatgcggaggcaagcatgccaggttccagccggtgtgtgtagatgtgactgaagatctcagaccggatcatttggttattgcccgcactggagcagagttcggatccagtggagaagaaactgactaaggtgagtattgggaaaactttggggtgggattttcagatggacagattgagtaaaaatttgttttttctgtcttgcagctgtcatgagtggaaacgcttcttttaaggggggagtcttcagcccttatctgacagggcgtctcccatcctgggcaggagttcgtcagaatgttatgggatctactgtggatggaagacccgtccaacccgccaattcttcaacgctgacctatgctactttaagttcttcacctttggacgcagctgcagctgccgccgccgcttctgttgccgctaacactgtgcttggaatgggttactatggaagcatcatggctaattccacttcctctaataacccttctaccctgactcaggacaagttacttgtccttttggcccagctggaggctttgacccaacgtctgggtgaactttctcagcaggtggtcgagttgcgagtacaaactgagtctgctgtcggcacggcaaagtctaaataaaaaaatcccagaatcaatgaataaataaacaagcttgttgttgatttaaaatcaagtgtttttatttcatttttcgcgcacggtatgccctagaccaccgatctctatcattgagaactcggtggattttttccaggatcctatagaggtgggattgaatgtttagatacatgggcattaggccgtctttggggtggagatagctccattgaagggattcatgctccggggtagtgttgtaaatcacccagtcataacaaggtcgcagtgcatggtgttgcacaatatcttttagaagtaggctgattgccacagataagcccttggtgtaggtgtttacaaaccggttgagctgggatgggtgcattcggggtgaaattatgtgcattttggattggatttttaagttggcaatattgccgccaagatcccgtcttgggttcatgttatgaaggaccaccaagacggtgtatccggtacatttaggaaatttatcgtgcagcttggatggaaaagcgtggaaaaatttggagacacccttgtgtcctccaagattttccatgcactcatccatgataatagcaatggggccgtgggcagcggcgcgggcaaacacgttccgtgggtctgacacatcatagttatgttcctgagttaaatcatcataagccattttaatgaatttggggcggagagtaccagattggggtatgaatgttccttcgggccccggagcatagttcccctcacagatttgcatttcccaagctttcagttccgagggtggaatcatgtccacctggggggctatgaaaaacaccgtttctggggcgggggtgattaattgtgatgatagcaaatttctgagcaattgagatttgccacatccggtggggccataaatgattccgattacgggttgcaggtggtagtttagggaacggcaactgccgtcttctcgaagcaagggggccacctcgttcatcatttcccttacatgcatattttcccgcaccaaatccattaggaggcgctctcctcctagtgatagaagttcttgtagtgaggaaaagtttttcagcggtttcagaccgtcagccatgggcattttggagagagtttgctgcaaaagttctagtctgttccacagttcagtgatgtgttctatggcatctcgatccagcagacctcctcgtttcgcgggtttggacggctcctggaatagggtatgagacgatgggcgtccagcgctgccagggttcggtccttccagggtctcagtgttcgagtcagggttgtttccgtcacagtgaaggggtgtgcgcctgcttgggcgcttgccagggtgcgcttcagactcatcctgctggtcgaaaacttctgtcgcttggcgccctgtatgtcggccaagtagcagtttaccatgagttcgtagttgagcgcctcggctgcgtggcctttggcgcggagcttacctttggaagttttcttgcataccgggcagtataggcatttcagcgcatacaacttgggcgcaaggaaaacggattctggggagtatgcatctgcgccgcaggaggcgcaaacagtttcacattccaccagccaggttaaatccggttcattggggtcaaaaacaagttttccgccatattttttgatgcgtttcttacctttggtctccatgagttcgtgtcctcgttgagtgacaaacaggctgtccgtgtccccgtagactgattttacaggcctcttctccagtggagtgcctcggtcttcttcgtacaggaactctgaccactctgatacaaaggcgcgcgtccaggccagcacaaaggaggctatgtgggaggggtagcgatcgttgtcaaccagggggtccaccttttccaaagtatgcaaacacatgtcaccctcttcaacatccaggaatgtgattggcttgtaggtgtatttcacgtgacctggggtccccgctgggggggtataaaagggggcggttctttgctcttcctcactgtcttccggatcgctgtccaggaacgtcagctgttggggtaggtattccctctcgaaggcgggcatgacctctgcactcaggttgtcagtttctaagaacgaggaggatttgatattgacagtgccggttgagatgcctttcatgaggttttcgtccatctggtcagaaaacacaatttttttattgtcaagtttggtggcaaatgatccatacagggcgttggataaaagtttggcaatggatcgcatggtttggttcttttccttgtccgcgcgctctttggcggcgatgttgagttggacatactcgcgtgccaggcacttccattcggggaagatagttgttaattcatctggcacgattctcacttgccaccctcgattatgcaaggtaattaaatccacactggtggccacctcgcctcgaaggggttcattggtccaacagagcctacctcctttcctagaacagaaagggggaagtgggtctagcataagttcatcgggagggtctgcatccatggtaaagattcccggaagtaaatccttatcaaaatagctgatgggagtggggtcatctaaggccatttgccattctcgagctgccagtgcgcgctcatatgggttaaggggactgccccatggcatgggatgggtgagtgcagaggcatacatgccacagatgtcatagacgtagatgggatcctcaaagatgcctatgtaggttggatagcatcgcccccctctgatacttgctcgcacatagtcatatagttcatgtgatggcgctagcagccccggacccaagttggtgcgattgggtttttctgttctgtagacgatctggcgaaagatggcgtgagaattggaagagatggtgggtctttgaaaaatgttgaaatgggcatgaggtagacctacagagtctctgacaaagtgggcataagattcttgaagcttggttaccagttcggcggtgacaagtacgtctagggcgcagtagtcaagtgtttcttgaatgatgtcataacctggttggtttttcttttcccacagttcgcggttgagaaggtattcttcgcgatccttccagtactcttctagcggaaacccgtctttgtctgcacggtaagatcctagcatgtagaactgattaactgccttgtaagggcagcagcccttctctacgggtagagagtatgcttgagcagcttttcgtagcgaagcgtgagtaagggcaaaggtgtctctgaccatgactttgaggaattggtatttgaagtcgatgtcgtcacaggctccctgttcccagagttggaagtctacccgtttcttgtaggcggggttgggcaaagcgaaagtaacatcattgaagagaatcttgccggccctgggcatgaaattgcgagtgatgcgaaaaggctgtggtacttccgctcggttattgataacctgggcagctaggacgatctcgtcgaaaccgttgatgttgtgtcctacgatgtataattctatgaaacgcggcgtgcctctgacgtgaggtagcttactgagctcatcaaaggttaggtctgtggggtcagataaggcgtagtgttcgagagcccattcgtgcaggtgaggattcgctttaaggaaggaggaccagaggtccactgccagtgctgtttgtaactggtcccggtactgacgaaaatgccgtccgactgccattttttctggggtgacgcaatagaaggtttgggggtcctgccgccagcgatcccacttgagttttatggcgaggtcataggcgatgttgacgagccgctggtctccagagagtttcatgaccagcatgaaggggattagctgcttgccaaaggaccccatccaggtgtaggtttccacatcgtaggtgagaaagagcctttctgtgcgaggatgagagccaatcgggaagaactggatctcctgccaccagttggaggaatggctgttgatgtgatggaagtagaactccctgcgacgcgccgagcattcatgcttgtgcttgtacagacggccgcagtagtcgcagcgttgcacgggttgtatctcgtgaatgagttgtacctggcttcccttgacgagaaatttcagtgggaagccgaggcctggcgattgtatctcgtgctttactatgttgtctgcatcggcctgttcatcttctgtctcgatggtggtcatgctgacgagccctcgcgggaggcaagtccagacctcggcgcggcaggggcggagctcgaggacgagagcgcgcaggctggagctgtccagggtcctgagacgctgcggactcaggttagtaggcagtgtcaggagattaacttgcatgatcttttggagggcgtgcgggaggttcagatagtacttgatctcaacgggtccgttggtggagatgtcgatggcttgcagggttccgtgtcccttgggcgctaccaccgtgcccttgtttttcattttggacggcggtggctctgttgcttcttgcatgtttagaagcggtgtcgagggcgcgcaccgggcggcaggggcggctcgggacccggcggcatggctggcagtggtacgtcggcgccgcgcgcgggtaggttctggtactgcgccctgagaagactcgcatgcgcgacgacgcggcggttgacatcctggatctgacgcctctgggtgaaagctaccggccccgtgagcttgaacctgaaagagagttcaacagaatcaatctcggtatcgttgacggcggcttgcctaaggatttcttgcacgtcaccagagttgtcctggtaggcgatctccgccatgaactgctcgatctcttcctcttgaagatctccgcggcccgctctctcgacggtggccgcgaggtcgttggagatgcgcccaatgagttgagagaatgcattcatgcccgcctcgttccagacgcggctgtagaccacggcccccacgggatctctcgcgcgcatgaccacctgggcgaggttgagctccacgtggcgggtgaagaccgcatagttgcataggcgctggaaaaggtagttgagtgtggtggcgatgtgctcggtgacgaagaaatacatgatccatcgtctcagcggcatctcgctgacatcgcccagagcttccaagcgctccatggcctcgtagaagtccacggcaaaattaaaaaactgggagtttcgcgcggacacggtcaactcctcttccagaagacggataagttcggcgatggtggtgcgcacctcgcgctcgaaagcccctgggatttcttcctcaatctcttcttcttccactaacatctcttcctcttcaggtggggctgcaggaggagggggaacgcggcgacgccggcggcgcacgggcagacggtcgatgaatctttcaatgacctctccgcggcggcggcgcatggtttcagtgacggcgcggccgttctcgcgcggtcgcagagtaaaaacaccgccgcgcatctccttaaagtggtgactgggaggttctccgtttgggagggagagggcgctgattatacattttattaattggcccgtagggactgcacgcagagatctgatcgtgtcaagatccacgggatctgaaaacctttcgacgaaagcgtctaaccagtcacagtcacaaggtaggctgagtacggcttcttgtgggcgggggtggttatgtgttcggtctgggtcttctgtttcttcttcatctcgggaaggtgagacgatgctgctggtgatgaaattaaagtaggcagttctaagacggcggatggtggcgaggagcaccaggtctttgggtccggcttgctggatacgcaggcgattggccattccccaagcattatcctgacatctagcaagatctttgtagtagtcttgcatgagccgttctacgggcacttcttcctcacccgttctgccatgcatacgtgtgagtccaaatccgcgcattggttgtaccagtgccaagtcagctacgactctttcggcgaggatggcttgctgtacttgggtaagggtggcttgaaagtcatcaaaatccacaaagcggtggtaagctcctgtattaatggtgtaagcacagttggccatgactgaccagttaactgtctggtgaccagggcgcacgagctcggtgtatttaaggcgcgaataggcgcgggtgtcaaagatgtaatcgttgcaggtgcgcaccagatactggtaccctataagaaaatgcggcggtggttggcggtagagaggccatcgttctgtagctggagcgccaggggcgaggtcttccaacataaggcggtgatagccgtagatgtacctggacatccaggtgattcctgcggcggtagtagaagcccgaggaaactcgcgtacgcggttccaaatgttgcgtagcggcatgaagtagttcattgtaggcacggtttgaccagtgaggcgcgcgcagtcattgatgctctatagacacggagaaaatgaaagcgttcagcgactcgactccgtagcctggaggaacgtgaacgggttgggtcgcggtgtaccccggttcgagacttgtactcgagccggccggagccgcggctaacgtggtattggcactcccgtctcgacccagcctacaaaaatccaggatacggaatcgagtcgttttgctggtttccgaatggcagggaagtgagtcctattttttttttttgccgctcagatgcatcccgtgctgcgacagatgcgcccccaacaacagcccccctcgcagcagcagcagcagcaatcacaaaaggctgtccctgcaactactgcaactgccgccgtgagcggtgcgggacagcccgcctatgatctggacttggaagagggcgaaggactggcacgtctaggtgcgccttcacccgagcggcatccgcgagttcaactgaaaaaagattctcgcgaggcgtatgtgccccaacagaacctatttagagacagaagcggcgaggagccggaggagatgcgagcttcccgctttaacgcgggtcgtgagctgcgtcacggtttggaccgaagacgagtgttgcgggacgaggatttcgaagttgatgaaatgacagggatcagtcctgccagggcacacgtggctgcagccaaccttgtatcggcttacgagcagacagtaaaggaagagcgtaacttccaaaagtcttttaataatcatgtgcgaaccctgattgcccgcgaagaagttacccttggtttgatgcatttgtgggatttgatggaagctatcattcagaaccctactagcaaacctctgaccgcccagctgtttctggtggtgcaacacagcagagacaatgaggctttcagagaggcgctgctgaacatcaccgaacccgaggggagatggttgtatgatcttatcaacattctacagagtatcatagtgcaggagcggagcctgggcctggccgagaaggtggctgccatcaattactcggttttgagcttgggaaaatattacgctcgcaaaatctacaagactccatacgttcccatagacaaggaggtgaagatagatgggttctacatgcgcatgacgctcaaggtcttgaccctgagcgatgatcttggggtgtatcgcaatgacagaatgcatcgcgcggttagcgccagcaggaggcgcgagttaagcgacagggaactgatgcacagtttgcaaagagctctgactggagctggaaccgagggtgagaattacttcgacatgggagctgacttgcagtggcagcctagtcgcagggctctgagcgccgcgacggcaggatgtgagcttccttacatagaagaggcggatgaaggcgaggaggaagagggcgagtacttggaagactgatggcacaacccgtgttttttgctagatggaacagcaagcaccggatcccgcaatgcgggcggcgctgcagagccagccgtccggcattaactcctcggacgattggacccaggccatgcaacgtatcatggcgttgacgactcgcaaccccgaagcctttagacagcaaccccaggccaaccgtctatcggccatcatggaagctgtagtgccttcccgctctaatcccactcatgagaaggtcctggccatcgtgaacgcgttggtggagaacaaagctattcgtccagatgaggccggactggtatacaacgctctcttagaacgcgtggctcgctacaacagtagcaatgtgcaaaccaatttggaccgtatgataacagatgtacgcgaagccgtgtctcagcgcgaaaggttccagcgtgatgccaacctgggttcgctggtggcgttaaatgctttcttgagtactcagcctgctaatgtgccgcgtggtcaacaggattatactaactttttaagtgctttgagactgatggtatcagaagtacctcagagcgaagtgtatcagtccggtcctgattacttctttcagactagcagacagggcttgcagacggtaaatctgagccaagcttttaaaaaccttaaaggtttgtggggagtgcatgccccggtaggagaaagagcaaccgtgtctagcttgttaactccgaactcccgcctattattactgttggtagctcctttcaccgacagcggtagcatcgaccgtaattcctatttgggttacctactaaacctgtatcgcgaagccatagggcaaagtcaggtggacgagcagacctatcaagaaattacccaagtcagtcgcgctttgggacaggaagacactggcagtttggaagccactctgaacttcttgcttaccaatcggtctcaaaagatccctcctcaatatgctcttactgcggaggaggagaggatccttagatatgtgcagcagagcgtgggattgtttctgatgcaagagggggcaactccgactgcagcactggacatgacagcgcgaaatatggagcccagcatgtatgccagtaaccgacctttcattaacaaactgctggactacttgcacagagctgccgctatgaactctgattatttcaccaatgccatcttaaacccgcactggctgcccccacctggtttctacacgggcgaatatgacatgcccgaccctaatgacggatttctgtgggacgacgtggacagcgatgttttttcacctctttctgatcatcgcacgtggaaaaaggaaggcggcgatagaatgcattcttctgcatcgctgtccggggtcatgggtgctaccgcggctgagcccgagtctgcaagtccttttcctagtctacccttttctctacacagtgtacgtagcagcgaagtgggtagaataagtcgcccgagtttaatgggcgaagaggagtatctaaacgattccttgctcagaccggcaagagaaaaaaatttcccaaacaatggaatagaaagtttggtggataaaatgagtagatggaagacttatgctcaggatcacagagacgagcctgggatcatggggattacaagtagagcgagccgtagacgccagcgccatgacagacagaggggtcttgtgtgggacgatgaggattcggccgatgatagcagcgtgctggacttgggtgggagaggaaggggcaacccgtttgctcatttgcgccctcgcttgggtggtatgttgtaaaaaaaaataaaaaaaaaactcaccaaggccatggcgacgagcgtacgttcgttcttctttattatctgtgtctagtataatgaggcgagtcgtgctaggcggagcggtggtgtatccggagggtcctcctccttcgtacgagagcgtgatgcagcagcagcaggcgacggcggtgatgcaatccccactggaggctccctttgtgcctccgcgatacctggcacctacggagggcagaaacagcattcgttattcggaactggcacctcagtacgataccaccaggttgtatctggtggacaacaagtcggcggacattgcttctctgaactatcagaatgaccacagcaacttcttgaccacggtggtgcaaaacaatgactttacccctacggaagccagcacccagaccattaactttgatgaacgatcgcggtggggcggtcagctaaagaccatcatgcatactaacatgccaaacgtgaacgagtatatgtttagtaacaagttcaaagcgcgtgtgatggtgtccagaaaacctcccgacggtgctgcagttggggatacttatgatcacaagcaggatattttgaaatatgagtggttcgagtttactttgccagaaggcaacttttcagttactatgactattgatttgatgaacaatgccatcatagataattacttgaaagtgggtagacagaatggagtgcttgaaagtgacattggtgttaagttcgacaccaggaacttcaagctgggatgggatcccgaaaccaagttgatcatgcctggagtgtatacgtatgaagccttccatcctgacattgtcttactgcctggctgcggagtggattttaccgagagtcgtttgagcaaccttcttggtatcagaaaaaaacagccatttcaagagggttttaagattttgtatgaagatttagaaggtggtaatattccggccctcttggatgtagatgcctatgagaacagtaagaaagaacaaaaagccaaaatagaagctgctacagctgctgcagaagctaaggcaaacatagttgccagcgactctacaagggttgctaacgctggagaggtcagaggagacaattttgcgccaacacctgttccgactgcagaatcattattggccgatgtgtctgaaggaacggacgtgaaactcactattcaacctgtagaaaaagatagtaagaatagaagctataatgtgttggaagacaaaatcaacacagcctatcgcagttggtatctttcgtacaattatggcgatcccgaaaaaggagtgcgttcctggacattgctcaccacctcagatgtcacctgcggagcagagcaggtctactggtcgcttccagacatgatgaaggatcctgtcactttccgctccactagacaagtcagtaactaccctgtggtgggtgcagagcttatgcccgtcttctcaaagagcttctacaacgaacaagctgtgtactcccagcagctccgccagtccacctcgcttacgcacgtcttcaaccgctttcctgagaaccagattttaatccgtccgccggcgcccaccattaccaccgtcagtgaaaacgttcctgctctcacagatcacgggaccctgccgttgcgcagcagtatccggggagtccaacgtgtgaccgttactgacgccagacgccgcacctgtccctacgtgtacaaggcactgggcatagtcgcaccgcgcgtcctttcaagccgcactttctaaaaaaaaaaaaaatgtccattcttatctcgcccagtaataacaccggttggggtctgcgcgctccaagcaagatgtacggaggcgcacgcaaacgttctacccaacatcctgtccgtgttcgcggacattttcgcgctccatggggcgccctcaagggccgcactcgcgttcgaaccaccgtcgatgatgtaatcgatcaggtggttgccgacgcccgtaattatactcctactgcgcctacatctactgtggatgcagttattgacagtgtagtggctgacgctcgcaactatgctcgacgtaagagccggcgaaggcgcattgccagacgccaccgagctaccactgccatgcgagccgcaagagctctgctacgaagagctagacgcgtggggcgaagagccatgcttagggcggccagacgtgcagcttcgggcgccagcgccggcaggtcccgcaggcaagcagccgctgtcgcagcggcgactattgccgacatggcccaatcgcgaagaggcaatgtatactgggtgcgtgacgctgccaccggtcaacgtgtacccgtgcgcacccgtccccctcgcacttagaagatactgagcagtctccgatgttgtgtcccagcggcgaggatgtccaagcgcaaatacaaggaagaaatgctgcaggttatcgcacctgaagtctacggccaaccgttgaaggatgaaaaaaaaccccgcaaaatcaagcgggttaaaaaggacaaaaaagaagaggaagatggcgatgatgggctggcggagtttgtgcgcgagtttgccccacggcgacgcgtgcaatggcgtgggcgcaaagttcgacatgtgttgagacctggaacttcggtggtctttacacccggcgagcgttcaagcgctacttttaagcgttcctatgatgaggtgtacggggatgatgatattcttgagcaggcggctgaccgattaggcgagtttgcttatggcaagcgtagtagaataacttccaaggatgagacagtgtcgatacccttggatcatggaaatcccacccctagtcttaaaccggtcactttgcagcaagtgttacccgtaactccgcgaacaggtgttaaacgcgaaggtgaagatttgtatcccactatgcaactgatggtacccaaacgccagaagttggaggacgttttggagaaagtaaaagtggatccagatattcaacctgaggttaaagtgagacccattaagcaggtagcgcctggtctgggggtacaaactgtagacattaagattcccactgaaagtatggaagtgcaaactgaacccgcaaagcctactgccacctccactgaagtgcaaacggatccatggatgcccatgcctattacaactgacgccgccggtcccactcgaagatcccgacgaaagtacggtccagcaagtctgttgatgcccaattatgttgtacacccatctattattcctactcctggttaccgaggcactcgctactatcgcagccgaaacagtacctcccgccgtcgccgcaagacacctgcaaatcgcagtcgtcgccgtagacgcacaagcaaaccgactcccggcgccctggtgcggcaagtgtaccgcaatggtagtgcggaacctttgacactgccgcgtgcgcgttaccatccgagtatcatcacttaatcaatgttgccgctgcctccttgcagatatggccctcacttgtcgccttcgcgttcccatcactggttaccgaggaagaaactcgcgccgtagaagagggatgttgggacgcggaatgcgacgctacaggcgacggcgtgctatccgcaagcaattgcggggtggttttttaccagccttaattccaattatcgctgctgcaattggcgcgataccaggcatagcttccgtggcggttcaggcctcgcaacgacattgacattggaaaaaaacgtataaataaaaaaaaaaaaatacaatggactctgacactcctggtcctgtgactatgttttcttagagatggaagacatcaatttttcatccttggctccgcgacacggcacgaagccgtacatgggcacctggagcgacatcggcacgagccaactgaacgggggcgccttcaattggagcagtatctggagcgggcttaaaaattttggctcaaccataaaaacatacgggaacaaagcttggaacagcagtacaggacaggcgcttagaaataaacttaaagaccagaacttccaacaaaaagtagtcgatgggatagcttccggcatcaatggagtggtagatttggctaaccaggctgtgcagaaaaagataaacagtcgtttggacccgccgccagcaaccccaggtgaaatgcaagtggaggaagaaattcctccgccagaaaaacgaggcgacaagcgtccgcgtcccgatttggaagagacgctggtgacgcgcgtagatgaaccgccttcttatgaggaagcaacgaagcttggaatgcccaccactagaccgatagccccaatggccaccggggtgatgaaaccttctcagttgcatcgacccgtcaccttggatttgccccctccccctgctgctactgctgtacccgcttctaagcctgtcgctgccccgaaaccagtcgccgtagccaggtcacgtcccgggggcgctcctcgtccaaatgcgcactggcaaaatactctgaacagcatcgtgggtctaggcgtgcaaagtgtaaaacgccgtcgctgcttttaattaaatatggagtagcgcttaacttgcctatctgtgtatatgtgtcattacacgccgtcacagcagcagaggaaaaaaggaagaggtcgtgcgtcgacgctgagttactttcaagatggccaccccatcgatgctgccccaatgggcatacatgcacatcgccggacaggatgcttcggagtacctgagtccgggtctggtgcagttcgcccgcgccacagacacctacttcaatctgggaaataagtttagaaatcccaccgtagcgccgacccacgatgtgaccaccgaccgtagccagcggctcatgttgcgcttcgtgcccgttgaccgggaggacaatacatactcttacaaagtgcggtacaccctggccgtgggcgacaacagagtgctggatatggccagcacgttctttgacattaggggtgtgttggacagaggtcccagtttcaaaccctattctggtacggcttacaactccctggctcctaaaggcgctccaaatacatctcagtggattgcagaaggtgtaaaaaatacaactggtgaggaacacgtaacagaagaggaaaccaatactactacttacacttttggcaatgctcctgtaaaagctgaagctgaaattacaaaagaaggactcccagtaggtttggaagtttcagatgaagaaagtaaaccgatttatgctgataaaacatatcagccagaacctcagctgggagatgaaacttggactgaccttgatggaaaaaccgaaaagtatggaggcagggctctcaaacccgatactaagatgaaaccatgctacgggtcctttgccaaacctactaatgtgaaaggcggtcaggcaaaacaaaaaacaacggagcagccaaatcagaaagtcgaatatgatatcgacatggagttttttgatgcggcatcgcagaaaacaaacttaagtcctaaaattgtcatgtatgcagaaaatgtaaatttggaaactccagacactcatgtagtgtacaaacctggaacagaagacacaagttccgaagctaatttgggacaacaatctatgcccaacagacccaactacattggcttcagagataactttattggacttatgtactataacagtactggtaacatgggggtgctggctggtcaagcgtctcagttaaatgcagtggttgacttgcaggacagaaacacagaactttcttaccaactcttgcttgactctctgggcgacagaaccagatactttagcatgtggaatcaggctgtggacagttatgatcctgatgtacgtgttattgaaaatcatggtgtggaagatgaacttcccaactactgttttccactggacggcataggtgttccaacaaccagttacaaatcaatagttccaaatggagacaatgcgcctaattggaaggaacctgaagtaaatggaacaagtgagatcggacagggtaatttgtttgccatggaaattaaccttcaagccaatctatggcgaagtttcctttattccaatgtggctctatatctcccagactcgtacaaatacaccccgtccaatgtcactcttccagaaaacaaaaacacctacgactacatgaacgggcgggtggtgccgccatctctagtagacacctatgtgaacattggtgccaggtggtctctggatgccatggacaatgtcaacccattcaaccaccaccgtaacgctggcttgcgttaccgatccatgcttctgggtaacggacgttatgtgcctttccacatacaagtgcctcaaaaattcttcgctgttaaaaacctgctgcttctcccaggctcctacacttatgagtggaactttaggaaggatgtgaacatggttctacagagttccctcggtaacgacctgcgggtagatggcgccagcatcagtttcacgagcatcaacctctatgctacttttttccccatggctcacaacaccgcttccacccttgaagccatgctgcggaatgacaccaatgatcagtcattcaacgactacctatctgcagctaacatgctctaccccattcctgccaatgcaaccaatattcccatttccattccttctcgcaactgggcggctttcagaggctggtcatttaccagactgaaaaccaaagaaactccctctttggggtctggatttgacccctactttgtctattctggttctattccctacctggatggtaccttctacctgaaccacacttttaagaaggtttccatcatgtttgactcttcagtgagctggcctggaaatgacaggttactatctcctaacgaatttgaaataaagcgcactgtggatggcgaaggctacaacgtagcccaatgcaacatgaccaaagactggttcttggtacagatgctcgccaactacaacatcggctatcagggcttctacattccagaaggatacaaagatcgcatgtattcatttttcagaaacttccagcccatgagcaggcaggtggttgatgaggtcaattacaaagacttcaaggccgtcgccataccctaccaacacaacaactctggctttgtgggttacatggctccgaccatgcgccaaggtcaaccctatcccgctaactatccctatccactcattggaacaactgccgtaaatagtgttacgcagaaaaagttcttgtgtgacagaaccatgtggcgcataccgttctcgagcaacttcatgtctatgggggcccttacagacttgggacagaatatgctctatgccaactcagctcatgctctggacatgacctttgaggtggatcccatggatgagcccaccctgctttatcttctcttcgaagttttcgacgtggtcagagtgcatcagccacaccgcggcatcatcgaggcagtctacctgcgtacaccgttctcggccggtaacgctaccacgtaagaagcttcttgcttcttgcaaatagcagctgcaaccatggcctgcggatcccaaaacggctccagcgagcaagagctcagagccattgtccaagacctgggttgcggaccctattttttgggaacctacgataagcgcttcccggggttcatggcccccgataagctcgcctgtgccattgtaaatacggccggacgtgagacggggggagagcactggttggctttcggttggaacccacgttctaacacctgctacctttttgatccttttggattctcggatgatcgtctcaaacagatttaccagtttgaatatgagggtctcctgcgccgcagcgctcttgctaccaaggaccgctgtattacgctggaaaaatctacccagaccgtgcagggtccccgttctgccgcctgcggacttttctgctgcatgttccttcacgcctttgtgcactggcctgaccgtcccatggacggaaaccccaccatgaaattgctaactggagtgccaaacaacatgcttcattctcctaaagtccagcccaccctgtgtgacaatcaaaaagcactctaccattttcttaatacccattcgccttattttcgctcccatcgtacacacatcgaaagggccactgcgttcgaccgtatggatgttcaataatgactcatgtaaacaacgtgttcaataaacatcactttatttttttacatgtatcaaggctctgcattacttatttatttacaagtcgaatgggttctgacgagaatcagaatgacccgcaggcagtgatacgttgcggaactgatacttgggttgccacttgaattcgggaatcaccaacttgggaaccggtatatcgggcaggatgtcactccacagctttctggtcagctgcaaagctccaagcaggtcaggagccgaaatcttgaaatcacaattaggaccagtgctttgagcgcgagagttgcggtacaccggattgcagcactgaaacaccatcagcgacggatgtctcacgcttgccagcacggtgggatctgcaatcatgcccacatccagatcttcagcattggcaatgctgaacggggtcatcttgcaggtctgcctacccatggcgggcacccaattaggcttgtggttgcaatcgcagtgcagggggatcagtatcatcttggcctgatcctgtctgattcctggatacacggctctcatgaaagcatcatattgcttgaaagcctgctgggctttactaccctcggtataaaacatcccgcaggacctgctcgaaaactggttagctgcacagccggcatcattcacacagcagcgggcgtcattgttagctatttgcaccacacttctgccccagcggttttgggtgattttggttcgctcgggattctcctttaaggctcgttgtccgttctcgctggccacatccatctcgataatctgctccttctgaatcataatattgccatgcaggcacttcagcttgccctcataatcattgcagccatgaggccacaacgcacagcctgtacattcccaattatggtgggcgatctgagaaaaagaatgtatcattccctgcagaaatcttcccatcatcgtgctcagtgtcttgtgactagtgaaagttaactggatgcctcggtgctcctcgtttacgtactggtgacagatgcgcttgtattgttcgtgttgctcaggcattagtttaaaagaggttctaagttcgttatccagcctgtacttctccatcagcagacacatcacttccatgcctttctcccaagcagacaccaggggcaagctaatcggattcttaacagtgcaggcagcagctcctttagccagagggtcatctttagcgatcttctcaatgcttcttttgccatccttctcaacgatgcgcacgggcgggtagctgaaacccactgctacaagttgcgcctcttctctttcttcttcgctgtcttgactgatgtcttgcatggggatatgtttggtcttccttggcttctttttggggggtatcggaggaggaggactgtcgctccgttccggagacagggaggattgtgacgtttcgctcaccattaccaactgactgtcggtagaagaacctgaccccacacggcgacaggtgtttctcttcgggggcagaggtggaggcgattgcgaagggctgcggtccgacctggaaggcggatgactggcagaaccccttccgcgttcgggggtgtgctccctgtggcggtcgcttaactgatttccttcgcggctggccattgtgttctcctaggcagagaaacaacagacatggaaactcagccattgctgtcaacatcgccacgagtgccatcacatctcgtcctcagcgacgaggaaaaggagcagagcttaagcattccaccgcccagtcctgccaccacctctaccctagaagataaggaggtcgacgcatctcatgacatgcagaataaaaaagcgaaagagtctgagacagacatcgagcaagacccgggctatgtgacaccggtggaacacgaggaagagttgaaacgctttctagagagagaggatgaaaactgcccaaaacaacgagcagataactatcaccaagatgctggaaatagggatcagaacaccgactacctcatagggcttgacggggaagacgcgctccttaaacatctagcaagacagtcgctcatagtcaaggatgcattattggacagaactgaagtgcccatcagtgtggaagagctcagccgcgcctacgagcttaacctcttttcacctcgtactccccccaaacgtcagccaaacggcacctgcgagccaaatcctcgcttaaacttttatccagcttttgctgtgccagaagtactggctacctatcacatcttttttaaaaatcaaaaaattccagtctcctgccgcgctaatcgcacccgcgccgatgccctactcaatctgggacctggttcacgcttacctgatatagcttccttggaagaggttccaaagatcttcgagggtctgggcaataatgagactcgggccgcaaatgctctgcaaaagggagaaaatggcatggatgagcatcacagcgttctggtggaattggaaggcgataatgccagactcgcagtactcaagcgaagcatcgaggtcacacacttcgcatatcccgctgtcaacctgccccctaaagtcatgacggcggtcatggaccagttactcattaagcgcgcaagtcccctttcagaagacatgcatgacccagatgcctgtgatgagggtaaaccagtggtcagtgatgagcagctaacccgatggctgggcaccgactctcccagggatttggaagagcgtcgcaagcttatgatggccgtggtgctggttaccgtagaactagagtgtctccgacgtttctttaccgattcagaaaccttgcgcaaactcgaagagaatctgcactacacttttagacacggctttgtgcggcaggcatgcaagatatctaacgtggaactcaccaacctggtttcctacatgggtattctgcatgagaatcgcctaggacaaagcgtgctgcacagcaccctgaagggggaagcccgccgtgattacatccgcgattgtgtctatctgtacctgtgccacacgtggcaaaccggcatgggtgtatggcagcaatgtttagaagaacagaacttgaaagagcttgacaagctcttacagaaatctcttaaggttctgtggacagggttcgacgagcgcaccgtcgcttccgacctggcagacctcatcttcccagagcgtctcagggttactttgcgaaacggattgcctgactttatgagccagagcatgcttaacaattttcgctctttcatcctggaacgctccggtatcctgcccgccacctgctgcgcactgccctccgactttgtgcctctcacctaccgcgagtgccccccgccgctatggagtcactgctacctgttccgtctggccaactatctctcctaccactcggatgtgatcgaggatgtgagcggagacggcttgctggagtgtcactgccgctgcaatctgtgcacgccccaccggtccctagcttgcaacccccagttgatgagcgaaacccagataataggcacctttgaattgcaaggccccagcagccaaggcgatgggtcttctcctgggcaaagtttaaaactgaccccgggactgtggacctccgcctacttgcgcaagtttgctccggaagattaccacccctatgaaatcaagttctatgaggaccaatcacagcctccaaaggccgaactttcggcctgcgtcatcacccagggggcaattctggcccaattgcaagccatccaaaaatcccgccaagaatttctactgaaaaagggtaagggggtctaccttgacccccagaccggcgaggaactcaacacaaggttccctcaggatgtcccaacgacgagaaaacaagaagttgaaggtgcagccgccgcccccagaagatatggaggaagattgggacagtcaggcagaggaggcggaggaggacagtctggaggacagtctggaggaagacagtttggaggaggaaaacgaggaggcagaggaggtggaagaagtaaccgccgacaaacagttatcctcggctgcggagacaagcaacagcgctaccatctccgctccgagtcgaggaacccggcggcgtcccagcagtagatgggacgagaccggacgcttcccgaacccaaccagcgcttccaagaccggtaagaaggatcggcagggatacaagtcctggcgggggcataagaatgccatcatctcctgcttgcatgagtgcgggggcaacatatccttcacgcggcgctacttgctattccaccatggggtgaactttccgcgcaatgttttgcattactaccgtcacctccacagcccctactatagccagcaaatcccggcagtctcgacagataaagacagcggcggcgacctccaacagaaaaccagcagcggcagttagaaaatacacaacaagtgcagcaacaggaggattaaagattacagccaacgagccagcgcaaacccgagagttaagaaatcggatctttccaaccctgtatgccatcttccagcagagtcggggtcaagagcaggaactgaaaataaaaaaccgatctctgcgttcgctcaccagaagttgtttgtatcacaagagcgaagatcaacttcagcgcactctcgaggacgccgaggctctcttcaacaagtactgcgcgctgactcttaaagagtaggcagcgaccgcgcttattcaaaaaaggcgggaattacatcatcctcgacatgagtaaagaaattcccacgccttacatgtggagttatcaaccccaaatgggattggcggcaggcgcctcccaggactactccacccgcatgaattggctcagcgccgggccttctatgatttctcgagttaatgatatacgcgcctaccgaaaccaaatacttttggaacagtcagctcttaccaccacgccccgccaacaccttaatcccagaaattggcccgccgccctagtgtaccaggaaagtcccgctcccaccactgtattacttcctcgagacgcccaggccgaagtccaaatgactaatgcaggtgcgcagttagctggcggctccaccctatgtcgtcacaggcctcggcataatataaaacgcctgatgatcagaggccgaggtatccagctcaacgacgagtcggtgagctctccgcttggtctacgaccagacggaatctttcagattgccggctgcgggagatcttccttcacccctcgtcaggctgttctgactttggaaagttcgtcttcgcaaccccgctcgggcggaatcgggaccgttcaatttgtggaggagtttactccctctgtctacttcaaccccttctccggatctcctgggcattacccggacgagttcataccgaacttcgacgcgattagcgagtcagtggacggctacgattgatgtctggtgacgcggctgagctatctcggctgcgacatctagaccactgccgccgctttcgctgctttgcccgggaactcattgagttcatctacttcgaactccccaaggatcaccctcaaggtccggcccacggagtgcggatttctatcgaaggcaaaatagactctcgcctgcaacgaattttctcccagcggcccgtgctgatcgagcgagaccagggaaacaccacggtttccatctactgcatttgtaatcaccccggattgcatgaaagcctttgctgtcttatgtgtactgagtttaataaaaactgaattaagactctcctacggactgccgcttcttcaacccggattttacaaccagaagaacgaaacttttcctgtcgtccaggactctgttaacttcacctttcctactcacaaactagaagctcaacgactacaccgcttttccagaagcattttccctactaatactactttcaaaaccggaggtgagctccaaggtcttcctacagaaaacccttgggtggaagcgggccttgtagtgctaggaattcttgcgggtgggcttgtgattattctttgctacctatacacaccttgcttcactttcttagtggtgttgtggtattggtttaaaaaatggggcccatactagtcttgcttgttttactttcgcttttggaaccgggttctgccaattacgatccatgtctagacttcgacccagaaaactgcacacttacttttgcacccgacacaagccgcatctgtggagttcatcgcctctcttacgaacttggcccccaacgacaaaaatttacctgcatggtgggaatcaaccccatagttatcacccagcaaagtggagatactaagggttgcattcactgctcctgcgattccatcgagtgcacctacaccctgctgaagaccctatgcggcctaagagacctgctaccaatgaattaaaaaatgattaataaaaaatcacttacttgaaatcagcaataaggtctctgttgaaattttctcccagcagcacctcacttccctcttcccaactctggtattctaaaccccgttcagcggcatactttctccatactttaaaggggatgtcaaattttagctcctctcctgtacccacaatcttcatgtctttcttcccagatgaccaagagagtccggctcagtgactccttcaaccctgtctacccctatgaagatgaaagcacctcccaacacccctttataaacccagggtttatttccccaaatggcttcacacaaagcccaaacggagttcttactttaaaatgtttaaccccactaacaaccacaggcggatctctacagctaaaagtgggagggggacttacagtggatgacaccaacggttttttgaaagaaaacataagtgccaccacaccactcgttaagactggtcactctataggtttaccactaggagccggattgggaacgaatgaaaataaactttgtatcaaattaggacaaggacttacattcaattcaaacaacatttgcattgatgacaatattaacaccttatggacaggagtcaaccccaccgaagccaactgtcaaatcatgaactccagtgaatctaatgattgcaaattaattctaacactagttaaaactggagcactagtcactgcatttgtttatgttataggagtatctaacaattttaatatgctaactacacacagaaatataaattttactgcagagctgtttttcgattctactggtaatttactaactagactctcatccctcaaaactccacttaatcataaatcaggacaaaacatggctactggtgccattactaatgctaaaggtttcatgcccagcacgactgcctatcctttcaatgataattctagagaaaaagaaaactacatttacggaacttgttactacacagctagtgatcgcactgcttttcccattgacatatctgtcatgcttaaccgaagagcaataaatgacgagacatcatattgtattcgtataacttggtcctggaacacaggagatgccccagaggtgcaaacctctgctacaaccctagtcacctccccatttaccttttactacatcagagaagacgactgacaaataaagtttgcgatcgctgctaatcctttctctcttcaggccaccatgggatggagctgtatcatcctcttcttggtagcaacagctacaggtgtccactccgaggttcagctggtggagtctggcggtggcctggtgcagccagggggctcactccgtttgtcctgtgcagcttctggctataccttcaccaactatggtatgaactgggtccgtcaggccccgggtaagggcctggaatgggttggatggattaacacctataccggtgaaccgacctatgctgcggatttcaaacgtcgttttactttttctctggacacctccaagagcacagcttacctgcagatgaacagcctgcgcgctgaggacactgccgtctattactgtgcaaagtacccgcactattatgggagcagccactggtatttcgacgtctggggtcaaggaaccctggtcaccgtctcctcgggtggcggtggctcgggcggtggtggatctggtggcggcggatctgatatccagatgacccagtccccgagctccctgtccgcctctgtgggcgatagggtcaccatcacctgcagcgcaagtcaggatattagcaactatttaaactggtatcaacagaaaccaggaaaagctccgaaagtcctgatttacttcacctcctctctccactctggagtcccttctcgcttctctggatccggttctgggacggatttcactctgaccatcagcagtctgcagccagaagacttcgcaacttattactgtcaacagtatagcaccgtgccgtggacgtttggacagggtaccaaggtggagatcaaacgataagctagcttgactgactgagatacagcgtaccttcagctcacagacatgataagatacattgatgagtttggacaaaccacaactagaatgcagtgaaaaaaatgctttatttgtgaaatttgtgatgctattgctttatttgtaaccattataagctgcaataaacaagttaacaacaacaattgcattcattttatgtttcaggttcagggggaggtgtgggaggttttttaaagcaagtaaaacctctacaaatgtggtagtcgtcagctatcctgcaggaacttgtttatttgaaaatcaattcacaaaatccgagtagttattttgcctcccccttcccatttaacagaatacaccaatctctccccacgcacagctttaaacatttggataccattagatatagacatggttttagattccacattccaaacagtttcagagcgagccaatctggggtcagtgatagataaaaatccatcgggatagtcttttaaagcgctttcacagtccaactgctgcggatgcgactccggagtctggatcacggtcatctggaagaagaacgatgggaatcataatccgaaaacggtatcggacgattgtgtctcatcaaacccacaagcagccgctgtctgcgtcgctccgtgcgactgctgtttatgggatcagggtccacagtgtcctgaagcatgattttaatagcccttaacatcaactttctggtgcgatgcgcgcagcaacgcattctgatttcactcaaatctttgcagtaggtacaacacattattacaatattgtttaataaaccataattaaaagcgctccagccaaaactcatatctgatataatcgcccctgcatgaccatcataccaaagtttaatataaattaaatgacgttccctcaaaaacacactacccacatacatgatctcttttggcatgtgcatattaacaatctgtctgtaccatggacaacgttggttaatcatgcaacccaatataaccttccggaaccacactgccaacaccgctcccccagccatgcattgaagtgaaccctgctgattacaatgacaatgaagaacccaattctctcgaccgtgaatcacttgagaatgaaaaatatctatagtggcacaacatagacataaatgcatgcatcttctcataatttttaactcctcaggatttagaaacatatcccagggaataggaagctcttgcagaacagtaaagctggcagaacaaggaagaccacgaacacaacttacactatgcatagtcatagtatcacaatctggcaacagcgggtggtcttcagtcatagaagctcgggtttcattttcctcacaacgtggtaactgggctctggtgtaagggtgatgtctggcgcatgatgtcgagcgtgcgcgcaaccttgtcataatggagttgcttcctgacattctcgtattttgtatagcaaaacgcggccctggcagaacacactcttcttcgccttctatcctgccgcttagcgtgttccgtgtgatagttcaagtacaaccacactcttaagttggtcaaaagaatgctggcttcagttgtaatcaaaactccatcgcatctaatcgttctgaggaaatcatccaagcaatgcaactggattgtgtttcaagcaggagaggagagggaagagacggaagaaccatgttaatttttattccaaacgatctcgcagtacttcaaattgtagatcgcgcagatggcatctctcgcccccactgtgttggtgaaaaagcacagctagatcaaaagaaatgcgattttcaaggtgctcaacggtggcttccagcaaagcctccacgcgcacatccaagaacaaaagaataccaaaagaaggagcattttctaactcctcaatcatcatattacattcctgcaccattcccagataattttcagctttccagccttgaattattcgtgtcagttcttgtggtaaatccaatccacacattacaaacaggtcccggagggcgccctccaccaccattcttaaacacaccctcataatgacaaaatatcttgctcctgtgtcacctgtagcgaattgagaatggcaacatcaattgacatgcccttggctctaagttcttctttaagttctagttgtaaaaactctctcatattatcaccaaactgcttagccagaagccccccgggaacaagagcaggggacgctacagtgcagtacaagcgcagacctccccaattggctccagcaaaaacaagattggaataagcatattgggaaccgccagtaatatcatcgaagttgctggaaatataatcaggcagagtttcttgtaaaaattgaataaaagaaaaatttgccaaaaaaacattcaaaacctctgggatgcaaatgcaataggttaccgcgctgcgctccaacattgttagttttgaattagtctgcaaaaataaaaaaaaaaacaagcgtcatatcatagtagcctgacgaacagatggataaatcagtctttccatcacaagacaagccacagggtctccagctcgaccctcgtaaaacctgtcatcatgattaaacaacagcaccgaaagttcctcgcggtgaccagcatgaataattcttgatgaagcatacaatccagacatgttagcatcagttaacgagaaaaaacagccaacatagcctttgggtataattatgcttaatcgtaagtatagcaaagccacccctcgcggatacaaagtaaaaggcacaggagaataaaaaatataattatttctctgctgctgttcaggcaacgtcgcccccggtccctctaaatacacatacaaagcctcatcagccatggcttaccagacaaagtacagcgggcacacaaagcacaagctctaaagtgactctccaacctctccacaatatatatatacacaagccctaaactgacgtaatgggagtaaagtgtaaaaaatcccgccaaacccaacacacaccccgaaactgcgtcaccagggaaaagtacagtttcacttccgcaatcccaacaggcgtaacttcctctttctcacggtacgtgatatcccactaacttgcaacgtcattttcccacggtcgcaccgccccttttagccgttaaccccacagccaatcaccacacgatccacactttttaaaatcacctcatttacatattggcaccattccatctataaggtatattatatagataga

SEQ ID NO: 6 - DNA, 33460 bp, Artificial Sequence
  NG-78 virus genome sequence
tctatctatataatataccttatagatggaatggtgccaatatgtaaatgaggtgattttaaaaagtgtggatcgtgtggtgattggctgtggggttaacggctaaaaggggcggtgcgaccgtgggaaaatgacgttttgtgggggtggagtttttttgcaagttgtcgcgggaaatgtgacgcataaaaaggcttttttctcacggaactacttagttttcccacggtatttaacaggaaatgaggtagttttgaccggatgcaagtgaaaattgttgattttcgcgcgaaaactgaatgaggaagtgtttttctgaataatgtggtatttatggcagggtggagtatttgttcagggccaggtagactttgacccattacgtggaggtttcgattaccgtgttttttacctgaatttccgcgtaccgtgtcaaagtcttctgtttttacgtaggtgtcagctgatcgctagggtatttatacctcagggtttgtgtcaagaggccactcttgagtgccagcgagaagagttttctcctctgcgccggcagtttaataataaaaaaatgagagatttgcgatttctgcctcaggaaataatctctgctgagactggaaatgaaatattggagcttgtggtgcacgccctgatgggagacgatccggagccacctgtgcagctttttgagcctcctacgcttcaggaactgtatgatttagaggtagagggatcggaggattctaatgaggaagctgtaaatggcttttttaccgattctatgcttttagctgctaatgaagggttagaattagatccgcctttggacacttttgatactccaggggtaattgtggaaagcggtacaggtgtaagaaaattacctgatttgagttccgtggactgtgatttgcactgctatgaagacgggtttcctccgagtgatgaggaggaccatgaaaaggagcagtccatgcagactgcagcgggtgagggagtgaaggctgccaatgttggttttcagttggattgcccggagcttcctggacatggctgtaagtcttgtgaatttcacaggaaaaatactggagtaaaggaactgttatgttcgctttgttatatgagaacgcactgccactttatttacagtaagtgtgtttaagttaaaatttaaaggaatatgctgtttttcacatgtatattgagtgtgagttttgtgcttcttattataggtcctgtgtctgatgctgatgaatcaccatctcctgattctactacctcacctcctgagattcaagcacctgttcctgtggacgtgcgcaagcccattcctgtgaagcttaagcctgggaaacgtccagcagtggaaaaacttgaggacttgttacagggtggggacggacctttggacttgagtacacggaaacgtccaagacaataagtgttccatatccgtgtttacttaaggtgacgtcaatatttgtgtgacagtgcaatgtaataaaaatatgttaactgttcactggtttttattgctttttgggcggggactcaggtatataagtagaagcagacctgtgtggttagctcataggagctggctttcatccatggaggtttgggccattttggaagaccttaggaagactaggcaactgttagagaacgcttcggacggagtctccggtttttggagattctggttcgctagtgaattagctagggtagtttttaggataaaacaggactataaacaagaatttgaaaagttgttggtagattgcccaggactttttgaagctcttaatttgggccatcaggttcactttaaagaaaaagttttatcagttttagacttttcaaccccaggtagaactgctgctgctgtggcttttcttacttttatattagataaatggatcccgcagactcatttcagcaggggatacgttttggatttcatagccacagcattgtggagaacatggaaggttcgcaagatgaggacaatcttaggttactggccagtgcagcctttgggtgtagcgggaatcctgaggcatccaccggtcatgccagcggttctggaggaggaacagcaagaggacaacccgagagccggcctggaccctccagtggaggaggcggagtagctgacttgtctcctgaactgcaacgggtgcttactggatctacgtccactggacgggataggggcgttaagagggagagggcatctagtggtactgatgctagatctgagttggctttaagtttaatgagtcgcagacgtcctgaaaccatttggtggcatgaggttcagaaagagggaagggatgaagtttctgtattgcaggagaaatattcactggaacaggtgaaaacatgttggttggagcctgaggatgattgggaggtggccattaaaaattatgccaagatagctttgaggcctgataaacagtataagattactagacggattaatatccggaatgcttgttacatatctggaaatggggctgaggtggtaatagatactcaagacaaggcagttattagatgctgcatgatggatatgtggcctggggtagtcggtatggaagcagtaacttttgtaaatgttaagtttaggggagatggttataatggaatagtgtttatggccaataccaaacttatattgcatggttgtagcttttttggtttcaacaatacctgtgtagatgcctggggacaggttagtgtacggggatgtagtttctatgcgtgttggattgccacagctggcagaaccaagagtcaattgtctctgaagaaatgcatatttcaaagatgtaacctgggcattctgaatgaaggcgaagcaagggtccgccactgcgcttctacagatactggatgttttattttgattaagggaaatgccagcgtaaagcataacatgatttgcggtgcttccgatgagaggccttatcaaatgctcacttgtgctggtgggcattgtaatatgctggctactgtgcatattgtttcccatcaacgcaaaaaatggcctgtttttgatcacaatgtgatgacgaagtgtaccatgcatgcaggtgggcgtagaggaatgtttatgccttaccagtgtaacatgaatcatgtgaaagtgttgttggaaccagatgccttttccagaatgagcctaacaggaatttttgacatgaacatgcaaatctggaagatcctgaggtatgatgatacgagatcgagggtacgcgcatgcgaatgcggaggcaagcatgccaggttccagccggtgtgtgtagatgtgactgaagatctcagaccggatcatttggttattgcccgcactggagcagagttcggatccagtggagaagaaactgactaaggtgagtattgggaaaactttggggtgggattttcagatggacagattgagtaaaaatttgttttttctgtcttgcagctgtcatgagtggaaacgcttcttttaaggggggagtcttcagcccttatctgacagggcgtctcccatcctgggcaggagttcgtcagaatgttatgggatctactgtggatggaagacccgtccaacccgccaattcttcaacgctgacctatgctactttaagttcttcacctttggacgcagctgcagctgccgccgccgcttctgttgccgctaacactgtgcttggaatgggttactatggaagcatcatggctaattccacttcctctaataacccttctaccctgactcaggacaagttacttgtccttttggcccagctggaggctttgacccaacgtctgggtgaactttctcagcaggtggtcgagttgcgagtacaaactgagtctgctgtcggcacggcaaagtctaaataaaaaaatcccagaatcaatgaataaataaacaagcttgttgttgatttaaaatcaagtgtttttatttcatttttcgcgcacggtatgccctagaccaccgatctctatcattgagaactcggtggattttttccaggatcctatagaggtgggattgaatgtttagatacatgggcattaggccgtctttggggtggagatagctccattgaagggattcatgctccggggtagtgttgtaaatcacccagtcataacaaggtcgcagtgcatggtgttgcacaatatcttttagaagtaggctgattgccacagataagcccttggtgtaggtgtttacaaaccggttgagctgggatgggtgcattcggggtgaaattatgtgcattttggattggatttttaagttggcaatattgccgccaagatcccgtcttgggttcatgttatgaaggaccaccaagacggtgtatccggtacatttaggaaatttatcgtgcagcttggatggaaaagcgtggaaaaatttggagacacccttgtgtcctccaagattttccatgcactcatccatgataatagcaatggggccgtgggcagcggcgcgggcaaacacgttccgtgggtctgacacatcatagttatgttcctgagttaaatcatcataagccattttaatgaatttggggcggagagtaccagattggggtatgaatgttccttcgggccccggagcatagttcccctcacagatttgcatttcccaagctttcagttccgagggtggaatcatgtccacctggggggctatgaaaaacaccgtttctggggcgggggtgattaattgtgatgatagcaaatttctgagcaattgagatttgccacatccggtggggccataaatgattccgattacgggttgcaggtggtagtttagggaacggcaactgccgtcttctcgaagcaagggggccacctcgttcatcatttcccttacatgcatattttcccgcaccaaatccattaggaggcgctctcctcctagtgatagaagttcttgtagtgaggaaaagtttttcagcggtttcagaccgtcagccatgggcattttggagagagtttgctgcaaaagttctagtctgttccacagttcagtgatgtgttctatggcatctcgatccagcagacctcctcgtttcgcgggtttggacggctcctggaatagggtatgagacgatgggcgtccagcgctgccagggttcggtccttccagggtctcagtgttcgagtcagggttgtttccgtcacagtgaaggggtgtgcgcctgcttgggcgcttgccagggtgcgcttcagactcatcctgctggtcgaaaacttctgtcgcttggcgccctgtatgtcggccaagtagcagtttaccatgagttcgtagttgagcgcctcggctgcgtggcctttggcgcggagcttacctttggaagttttcttgcataccgggcagtataggcatttcagcgcatacaacttgggcgcaaggaaaacggattctggggagtatgcatctgcgccgcaggaggcgcaaacagtttcacattccaccagccaggttaaatccggttcattggggtcaaaaacaagttttccgccatattttttgatgcgtttcttacctttggtctccatgagttcgtgtcctcgttgagtgacaaacaggctgtccgtgtccccgtagactgattttacaggcctcttctccagtggagtgcctcggtcttcttcgtacaggaactctgaccactctgatacaaaggcgcgcgtccaggccagcacaaaggaggctatgtgggaggggtagcgatcgttgtcaaccagggggtccaccttttccaaagtatgcaaacacatgtcaccctcttcaacatccaggaatgtgattggcttgtaggtgtatttcacgtgacctggggtccccgctgggggggtataaaagggggcggttctttgctcttcctcactgtcttccggatcgctgtccaggaacgtcagctgttggggtaggtattccctctcgaaggcgggcatgacctctgcactcaggttgtcagtttctaagaacgaggaggatttgatattgacagtgccggttgagatgcctttcatgaggttttcgtccatctggtcagaaaacacaatttttttattgtcaagtttggtggcaaatgatccatacagggcgttggataaaagtttggcaatggatcgcatggtttggttcttttccttgtccgcgcgctctttggcggcgatgttgagttggacatactcgcgtgccaggcacttccattcggggaagatagttgttaattcatctggcacgattctcacttgccaccctcgattatgcaaggtaattaaatccacactggtggccacctcgcctcgaaggggttcattggtccaacagagcctacctcctttcctagaacagaaagggggaagtgggtctagcataagttcatcgggagggtctgcatccatggtaaagattcccggaagtaaatccttatcaaaatagctgatgggagtggggtcatctaaggccatttgccattctcgagctgccagtgcgcgctcatatgggttaaggggactgccccatggcatgggatgggtgagtgcagaggcatacatgccacagatgtcatagacgtagatgggatcctcaaagatgcctatgtaggttggatagcatcgcccccctctgatacttgctcgcacatagtcatatagttcatgtgatggcgctagcagccccggacccaagttggtgcgattgggtttttctgttctgtagacgatctggcgaaagatggcgtgagaattggaagagatggtgggtctttgaaaaatgttgaaatgggcatgaggtagacctacagagtctctgacaaagtgggcataagattcttgaagcttggttaccagttcggcggtgacaagtacgtctagggcgcagtagtcaagtgtttcttgaatgatgtcataacctggttggtttttcttttcccacagttcgcggttgagaaggtattcttcgcgatccttccagtactcttctagcggaaacccgtctttgtctgcacggtaagatcctagcatgtagaactgattaactgccttgtaagggcagcagcccttctctacgggtagagagtatgcttgagcagcttttcgtagcgaagcgtgagtaagggcaaaggtgtctctgaccatgactttgaggaattggtatttgaagtcgatgtcgtcacaggctccctgttcccagagttggaagtctacccgtttcttgtaggcggggttgggcaaagcgaaagtaacatcattgaagagaatcttgccggccctgggcatgaaattgcgagtgatgcgaaaaggctgtggtacttccgctcggttattgataacctgggcagctaggacgatctcgtcgaaaccgttgatgttgtgtcctacgatgtataattctatgaaacgcggcgtgcctctgacgtgaggtagcttactgagctcatcaaaggttaggtctgtggggtcagataaggcgtagtgttcgagagcccattcgtgcaggtgaggattcgctttaaggaaggaggaccagaggtccactgccagtgctgtttgtaactggtcccggtactgacgaaaatgccgtccgactgccattttttctggggtgacgcaatagaaggtttgggggtcctgccgccagcgatcccacttgagttttatggcgaggtcataggcgatgttgacgagccgctggtctccagagagtttcatgaccagcatgaaggggattagctgcttgccaaaggaccccatccaggtgtaggtttccacatcgtaggtgagaaagagcctttctgtgcgaggatgagagccaatcgggaagaactggatctcctgccaccagttggaggaatggctgttgatgtgatggaagtagaactccctgcgacgcgccgagcattcatgcttgtgcttgtacagacggccgcagtagtcgcagcgttgcacgggttgtatctcgtgaatgagttgtacctggcttcccttgacgagaaatttcagtgggaagccgaggcctggcgattgtatctcgtgctttactatgttgtctgcatcggcctgttcatcttctgtctcgatggtggtcatgctgacgagccctcgcgggaggcaagtccagacctcggcgcggcaggggcggagctcgaggacgagagcgcgcaggctggagctgtccagggtcctgagacgctgcggactcaggttagtaggcagtgtcaggagattaacttgcatgatcttttggagggcgtgcgggaggttcagatagtacttgatctcaacgggtccgttggtggagatgtcgatggcttgcagggttccgtgtcccttgggcgctaccaccgtgcccttgtttttcattttggacggcggtggctctgttgcttcttgcatgtttagaagcggtgtcgagggcgcgcaccgggcggcaggggcggctcgggacccggcggcatggctggcagtggtacgtcggcgccgcgcgcgggtaggttctggtactgcgccctgagaagactcgcatgcgcgacgacgcggcggttgacatcctggatctgacgcctctgggtgaaagctaccggccccgtgagcttgaacctgaaagagagttcaacagaatcaatctcggtatcgttgacggcggcttgcctaaggatttcttgcacgtcaccagagttgtcctggtaggcgatctccgccatgaactgctcgatctcttcctcttgaagatctccgcggcccgctctctcgacggtggccgcgaggtcgttggagatgcgcccaatgagttgagagaatgcattcatgcccgcctcgttccagacgcggctgtagaccacggcccccacgggatctctcgcgcgcatgaccacctgggcgaggttgagctccacgtggcgggtgaagaccgcatagttgcataggcgctggaaaaggtagttgagtgtggtggcgatgtgctcggtgacgaagaaatacatgatccatcgtctcagcggcatctcgctgacatcgcccagagcttccaagcgctccatggcctcgtagaagtccacggcaaaattaaaaaactgggagtttcgcgcggacacggtcaactcctcttccagaagacggataagttcggcgatggtggtgcgcacctcgcgctcgaaagcccctgggatttcttcctcaatctcttcttcttccactaacatctcttcctcttcaggtggggctgcaggaggagggggaacgcggcgacgccggcggcgcacgggcagacggtcgatgaatctttcaatgacctctccgcggcggcggcgcatggtttcagtgacggcgcggccgttctcgcgcggtcgcagagtaaaaacaccgccgcgcatctccttaaagtggtgactgggaggttctccgtttgggagggagagggcgctgattatacattttattaattggcccgtagggactgcacgcagagatctgatcgtgtcaagatccacgggatctgaaaacctttcgacgaaagcgtctaaccagtcacagtcacaaggtaggctgagtacggcttcttgtgggcgggggtggttatgtgttcggtctgggtcttctgtttcttcttcatctcgggaaggtgagacgatgctgctggtgatgaaattaaagtaggcagttctaagacggcggatggtggcgaggagcaccaggtctttgggtccggcttgctggatacgcaggcgattggccattccccaagcattatcctgacatctagcaagatctttgtagtagtcttgcatgagccgttctacgggcacttcttcctcacccgttctgccatgcatacgtgtgagtccaaatccgcgcattggttgtaccagtgccaagtcagctacgactctttcggcgaggatggcttgctgtacttgggtaagggtggcttgaaagtcatcaaaatccacaaagcggtggtaagctcctgtattaatggtgtaagcacagttggccatgactgaccagttaactgtctggtgaccagggcgcacgagctcggtgtatttaaggcgcgaataggcgcgggtgtcaaagatgtaatcgttgcaggtgcgcaccagatactggtaccctataagaaaatgcggcggtggttggcggtagagaggccatcgttctgtagctggagcgccaggggcgaggtcttccaacataaggcggtgatagccgtagatgtacctggacatccaggtgattcctgcggcggtagtagaagcccgaggaaactcgcgtacgcggttccaaatgttgcgtagcggcatgaagtagttcattgtaggcacggtttgaccagtgaggcgcgcgcagtcattgatgctctatagacacggagaaaatgaaagcgttcagcgactcgactccgtagcctggaggaacgtgaacgggttgggtcgcggtgtaccccggttcgagacttgtactcgagccggccggagccgcggctaacgtggtattggcactcccgtctcgacccagcctacaaaaatccaggatacggaatcgagtcgttttgctggtttccgaatggcagggaagtgagtcctattttttttttttgccgctcagatgcatcccgtgctgcgacagatgcgcccccaacaacagcccccctcgcagcagcagcagcagcaatcacaaaaggctgtccctgcaactactgcaactgccgccgtgagcggtgcgggacagcccgcctatgatctggacttggaagagggcgaaggactggcacgtctaggtgcgccttcacccgagcggcatccgcgagttcaactgaaaaaagattctcgcgaggcgtatgtgccccaacagaacctatttagagacagaagcggcgaggagccggaggagatgcgagcttcccgctttaacgcgggtcgtgagctgcgtcacggtttggaccgaagacgagtgttgcgggacgaggatttcgaagttgatgaaatgacagggatcagtcctgccagggcacacgtggctgcagccaaccttgtatcggcttacgagcagacagtaaaggaagagcgtaacttccaaaagtcttttaataatcatgtgcgaaccctgattgcccgcgaagaagttacccttggtttgatgcatttgtgggatttgatggaagctatcattcagaaccctactagcaaacctctgaccgcccagctgtttctggtggtgcaacacagcagagacaatgaggctttcagagaggcgctgctgaacatcaccgaacccgaggggagatggttgtatgatcttatcaacattctacagagtatcatagtgcaggagcggagcctgggcctggccgagaaggtggctgccatcaattactcggttttgagcttgggaaaatattacgctcgcaaaatctacaagactccatacgttcccatagacaaggaggtgaagatagatgggttctacatgcgcatgacgctcaaggtcttgaccctgagcgatgatcttggggtgtatcgcaatgacagaatgcatcgcgcggttagcgccagcaggaggcgcgagttaagcgacagggaactgatgcacagtttgcaaagagctctgactggagctggaaccgagggtgagaattacttcgacatgggagctgacttgcagtggcagcctagtcgcagggctctgagcgccgcgacggcaggatgtgagcttccttacatagaagaggcggatgaaggcgaggaggaagagggcgagtacttggaagactgatggcacaacccgtgttttttgctagatggaacagcaagcaccggatcccgcaatgcgggcggcgctgcagagccagccgtccggcattaactcctcggacgattggacccaggccatgcaacgtatcatggcgttgacgactcgcaaccccgaagcctttagacagcaaccccaggccaaccgtctatcggccatcatggaagctgtagtgccttcccgctctaatcccactcatgagaaggtcctggccatcgtgaacgcgttggtggagaacaaagctattcgtccagatgaggccggactggtatacaacgctctcttagaacgcgtggctcgctacaacagtagcaatgtgcaaaccaatttggaccgtatgataacagatgtacgcgaagccgtgtctcagcgcgaaaggttccagcgtgatgccaacctgggttcgctggtggcgttaaatgctttcttgagtactcagcctgctaatgtgccgcgtggtcaacaggattatactaactttttaagtgctttgagactgatggtatcagaagtacctcagagcgaagtgtatcagtccggtcctgattacttctttcagactagcagacagggcttgcagacggtaaatctgagccaagcttttaaaaaccttaaaggtttgtggggagtgcatgccccggtaggagaaagagcaaccgtgtctagcttgttaactccgaactcccgcctattattactgttggtagctcctttcaccgacagcggtagcatcgaccgtaattcctatttgggttacctactaaacctgtatcgcgaagccatagggcaaagtcaggtggacgagcagacctatcaagaaattacccaagtcagtcgcgctttgggacaggaagacactggcagtttggaagccactctgaacttcttgcttaccaatcggtctcaaaagatccctcctcaatatgctcttactgcggaggaggagaggatccttagatatgtgcagcagagcgtgggattgtttctgatgcaagagggggcaactccgactgcagcactggacatgacagcgcgaaatatggagcccagcatgtatgccagtaaccgacctttcattaacaaactgctggactacttgcacagagctgccgctatgaactctgattatttcaccaatgccatcttaaacccgcactggctgcccccacctggtttctacacgggcgaatatgacatgcccgaccctaatgacggatttctgtgggacgacgtggacagcgatgttttttcacctctttctgatcatcgcacgtggaaaaaggaaggcggcgatagaatgcattcttctgcatcgctgtccggggtcatgggtgctaccgcggctgagcccgagtctgcaagtccttttcctagtctacccttttctctacacagtgtacgtagcagcgaagtgggtagaataagtcgcccgagtttaatgggcgaagaggagtatctaaacgattccttgctcagaccggcaagagaaaaaaatttcccaaacaatggaatagaaagtttggtggataaaatgagtagatggaagacttatgctcaggatcacagagacgagcctgggatcatggggattacaagtagagcgagccgtagacgccagcgccatgacagacagaggggtcttgtgtgggacgatgaggattcggccgatgatagcagcgtgctggacttgggtgggagaggaaggggcaacccgtttgctcatttgcgccctcgcttgggtggtatgttgtaaaaaaaaataaaaaaaaaactcaccaaggccatggcgacgagcgtacgttcgttcttctttattatctgtgtctagtataatgaggcgagtcgtgctaggcggagcggtggtgtatccggagggtcctcctccttcgtacgagagcgtgatgcagcagcagcaggcgacggcggtgatgcaatccccactggaggctccctttgtgcctccgcgatacctggcacctacggagggcagaaacagcattcgttattcggaactggcacctcagtacgataccaccaggttgtatctggtggacaacaagtcggcggacattgcttctctgaactatcagaatgaccacagcaacttcttgaccacggtggtgcaaaacaatgactttacccctacggaagccagcacccagaccattaactttgatgaacgatcgcggtggggcggtcagctaaagaccatcatgcatactaacatgccaaacgtgaacgagtatatgtttagtaacaagttcaaagcgcgtgtgatggtgtccagaaaacctcccgacggtgctgcagttggggatacttatgatcacaagcaggatattttgaaatatgagtggttcgagtttactttgccagaaggcaacttttcagttactatgactattgatttgatgaacaatgccatcatagataattacttgaaagtgggtagacagaatggagtgcttgaaagtgacattggtgttaagttcgacaccaggaacttcaagctgggatgggatcccgaaaccaagttgatcatgcctggagtgtatacgtatgaagccttccatcctgacattgtcttactgcctggctgcggagtggattttaccgagagtcgtttgagcaaccttcttggtatcagaaaaaaacagccatttcaagagggttttaagattttgtatgaagatttagaaggtggtaatattccggccctcttggatgtagatgcctatgagaacagtaagaaagaacaaaaagccaaaatagaagctgctacagctgctgcagaagctaaggcaaacatagttgccagcgactctacaagggttgctaacgctggagaggtcagaggagacaattttgcgccaacacctgttccgactgcagaatcattattggccgatgtgtctgaaggaacggacgtgaaactcactattcaacctgtagaaaaagatagtaagaatagaagctataatgtgttggaagacaaaatcaacacagcctatcgcagttggtatctttcgtacaattatggcgatcccgaaaaaggagtgcgttcctggacattgctcaccacctcagatgtcacctgcggagcagagcaggtctactggtcgcttccagacatgatgaaggatcctgtcactttccgctccactagacaagtcagtaactaccctgtggtgggtgcagagcttatgcccgtcttctcaaagagcttctacaacgaacaagctgtgtactcccagcagctccgccagtccacctcgcttacgcacgtcttcaaccgctttcctgagaaccagattttaatccgtccgccggcgcccaccattaccaccgtcagtgaaaacgttcctgctctcacagatcacgggaccctgccgttgcgcagcagtatccggggagtccaacgtgtgaccgttactgacgccagacgccgcacctgtccctacgtgtacaaggcactgggcatagtcgcaccgcgcgtcctttcaagccgcactttctaaaaaaaaaaaaaatgtccattcttatctcgcccagtaataacaccggttggggtctgcgcgctccaagcaagatgtacggaggcgcacgcaaacgttctacccaacatcctgtccgtgttcgcggacattttcgcgctccatggggcgccctcaagggccgcactcgcgttcgaaccaccgtcgatgatgtaatcgatcaggtggttgccgacgcccgtaattatactcctactgcgcctacatctactgtggatgcagttattgacagtgtagtggctgacgctcgcaactatgctcgacgtaagagccggcgaaggcgcattgccagacgccaccgagctaccactgccatgcgagccgcaagagctctgctacgaagagctagacgcgtggggcgaagagccatgcttagggcggccagacgtgcagcttcgggcgccagcgccggcaggtcccgcaggcaagcagccgctgtcgcagcggcgactattgccgacatggcccaatcgcgaagaggcaatgtatactgggtgcgtgacgctgccaccggtcaacgtgtacccgtgcgcacccgtccccctcgcacttagaagatactgagcagtctccgatgttgtgtcccagcggcgaggatgtccaagcgcaaatacaaggaagaaatgctgcaggttatcgcacctgaagtctacggccaaccgttgaaggatgaaaaaaaaccccgcaaaatcaagcgggttaaaaaggacaaaaaagaagaggaagatggcgatgatgggctggcggagtttgtgcgcgagtttgccccacggcgacgcgtgcaatggcgtgggcgcaaagttcgacatgtgttgagacctggaacttcggtggtctttacacccggcgagcgttcaagcgctacttttaagcgttcctatgatgaggtgtacggggatgatgatattcttgagcaggcggctgaccgattaggcgagtttgcttatggcaagcgtagtagaataacttccaaggatgagacagtgtcgatacccttggatcatggaaatcccacccctagtcttaaaccggtcactttgcagcaagtgttacccgtaactccgcgaacaggtgttaaacgcgaaggtgaagatttgtatcccactatgcaactgatggtacccaaacgccagaagttggaggacgttttggagaaagtaaaagtggatccagatattcaacctgaggttaaagtgagacccattaagcaggtagcgcctggtctgggggtacaaactgtagacattaagattcccactgaaagtatggaagtgcaaactgaacccgcaaagcctactgccacctccactgaagtgcaaacggatccatggatgcccatgcctattacaactgacgccgccggtcccactcgaagatcccgacgaaagtacggtccagcaagtctgttgatgcccaattatgttgtacacccatctattattcctactcctggttaccgaggcactcgctactatcgcagccgaaacagtacctcccgccgtcgccgcaagacacctgcaaatcgcagtcgtcgccgtagacgcacaagcaaaccgactcccggcgccctggtgcggcaagtgtaccgcaatggtagtgcggaacctttgacactgccgcgtgcgcgttaccatccgagtatcatcacttaatcaatgttgccgctgcctccttgcagatatggccctcacttgtcgccttcgcgttcccatcactggttaccgaggaagaaactcgcgccgtagaagagggatgttgggacgcggaatgcgacgctacaggcgacggcgtgctatccgcaagcaattgcggggtggttttttaccagccttaattccaattatcgctgctgcaattggcgcgataccaggcatagcttccgtggcggttcaggcctcgcaacgacattgacattggaaaaaaacgtataaataaaaaaaaaaaaatacaatggactctgacactcctggtcctgtgactatgttttcttagagatggaagacatcaatttttcatccttggctccgcgacacggcacgaagccgtacatgggcacctggagcgacatcggcacgagccaactgaacgggggcgccttcaattggagcagtatctggagcgggcttaaaaattttggctcaaccataaaaacatacgggaacaaagcttggaacagcagtacaggacaggcgcttagaaataaacttaaagaccagaacttccaacaaaaagtagtcgatgggatagcttccggcatcaatggagtggtagatttggctaaccaggctgtgcagaaaaagataaacagtcgtttggacccgccgccagcaaccccaggtgaaatgcaagtggaggaagaaattcctccgccagaaaaacgaggcgacaagcgtccgcgtcccgatttggaagagacgctggtgacgcgcgtagatgaaccgccttcttatgaggaagcaacgaagcttggaatgcccaccactagaccgatagccccaatggccaccggggtgatgaaaccttctcagttgcatcgacccgtcaccttggatttgccccctccccctgctgctactgctgtacccgcttctaagcctgtcgctgccccgaaaccagtcgccgtagccaggtcacgtcccgggggcgctcctcgtccaaatgcgcactggcaaaatactctgaacagcatcgtgggtctaggcgtgcaaagtgtaaaacgccgtcgctgcttttaattaaatatggagtagcgcttaacttgcctatctgtgtatatgtgtcattacacgccgtcacagcagcagaggaaaaaaggaagaggtcgtgcgtcgacgctgagttactttcaagatggccaccccatcgatgctgccccaatgggcatacatgcacatcgccggacaggatgcttcggagtacctgagtccgggtctggtgcagttcgcccgcgccacagacacctacttcaatctgggaaataagtttagaaatcccaccgtagcgccgacccacgatgtgaccaccgaccgtagccagcggctcatgttgcgcttcgtgcccgttgaccgggaggacaatacatactcttacaaagtgcggtacaccctggccgtgggcgacaacagagtgctggatatggccagcacgttctttgacattaggggtgtgttggacagaggtcccagtttcaaaccctattctggtacggcttacaactccctggctcctaaaggcgctccaaatacatctcagtggattgcagaaggtgtaaaaaatacaactggtgaggaacacgtaacagaagaggaaaccaatactactacttacacttttggcaatgctcctgtaaaagctgaagctgaaattacaaaagaaggactcccagtaggtttggaagtttcagatgaagaaagtaaaccgatttatgctgataaaacatatcagccagaacctcagctgggagatgaaacttggactgaccttgatggaaaaaccgaaaagtatggaggcagggctctcaaacccgatactaagatgaaaccatgctacgggtcctttgccaaacctactaatgtgaaaggcggtcaggcaaaacaaaaaacaacggagcagccaaatcagaaagtcgaatatgatatcgacatggagttttttgatgcggcatcgcagaaaacaaacttaagtcctaaaattgtcatgtatgcagaaaatgtaaatttggaaactccagacactcatgtagtgtacaaacctggaacagaagacacaagttccgaagctaatttgggacaacaatctatgcccaacagacccaactacattggcttcagagataactttattggacttatgtactataacagtactggtaacatgggggtgctggctggtcaagcgtctcagttaaatgcagtggttgacttgcaggacagaaacacagaactttcttaccaactcttgcttgactctctgggcgacagaaccagatactttagcatgtggaatcaggctgtggacagttatgatcctgatgtacgtgttattgaaaatcatggtgtggaagatgaacttcccaactactgttttccactggacggcataggtgttccaacaaccagttacaaatcaatagttccaaatggagacaatgcgcctaattggaaggaacctgaagtaaatggaacaagtgagatcggacagggtaatttgtttgccatggaaattaaccttcaagccaatctatggcgaagtttcctttattccaatgtggctctatatctcccagactcgtacaaatacaccccgtccaatgtcactcttccagaaaacaaaaacacctacgactacatgaacgggcgggtggtgccgccatctctagtagacacctatgtgaacattggtgccaggtggtctctggatgccatggacaatgtcaacccattcaaccaccaccgtaacgctggcttgcgttaccgatccatgcttctgggtaacggacgttatgtgcctttccacatacaagtgcctcaaaaattcttcgctgttaaaaacctgctgcttctcccaggctcctacacttatgagtggaactttaggaaggatgtgaacatggttctacagagttccctcggtaacgacctgcgggtagatggcgccagcatcagtttcacgagcatcaacctctatgctacttttttccccatggctcacaacaccgcttccacccttgaagccatgctgcggaatgacaccaatgatcagtcattcaacgactacctatctgcagctaacatgctctaccccattcctgccaatgcaaccaatattcccatttccattccttctcgcaactgggcggctttcagaggctggtcatttaccagactgaaaaccaaagaaactccctctttggggtctggatttgacccctactttgtctattctggttctattccctacctggatggtaccttctacctgaaccacacttttaagaaggtttccatcatgtttgactcttcagtgagctggcctggaaatgacaggttactatctcctaacgaatttgaaataaagcgcactgtggatggcgaaggctacaacgtagcccaatgcaacatgaccaaagactggttcttggtacagatgctcgccaactacaacatcggctatcagggcttctacattccagaaggatacaaagatcgcatgtattcatttttcagaaacttccagcccatgagcaggcaggtggttgatgaggtcaattacaaagacttcaaggccgtcgccataccctaccaacacaacaactctggctttgtgggttacatggctccgaccatgcgccaaggtcaaccctatcccgctaactatccctatccactcattggaacaactgccgtaaatagtgttacgcagaaaaagttcttgtgtgacagaaccatgtggcgcataccgttctcgagcaacttcatgtctatgggggcccttacagacttgggacagaatatgctctatgccaactcagctcatgctctggacatgacctttgaggtggatcccatggatgagcccaccctgctttatcttctcttcgaagttttcgacgtggtcagagtgcatcagccacaccgcggcatcatcgaggcagtctacctgcgtacaccgttctcggccggtaacgctaccacgtaagaagcttcttgcttcttgcaaatagcagctgcaaccatggcctgcggatcccaaaacggctccagcgagcaagagctcagagccattgtccaagacctgggttgcggaccctattttttgggaacctacgataagcgcttcccggggttcatggcccccgataagctcgcctgtgccattgtaaatacggccggacgtgagacggggggagagcactggttggctttcggttggaacccacgttctaacacctgctacctttttgatccttttggattctcggatgatcgtctcaaacagatttaccagtttgaatatgagggtctcctgcgccgcagcgctcttgctaccaaggaccgctgtattacgctggaaaaatctacccagaccgtgcagggtccccgttctgccgcctgcggacttttctgctgcatgttccttcacgcctttgtgcactggcctgaccgtcccatggacggaaaccccaccatgaaattgctaactggagtgccaaacaacatgcttcattctcctaaagtccagcccaccctgtgtgacaatcaaaaagcactctaccattttcttaatacccattcgccttattttcgctcccatcgtacacacatcgaaagggccactgcgttcgaccgtatggatgttcaataatgactcatgtaaacaacgtgttcaataaacatcactttatttttttacatgtatcaaggctctgcattacttatttatttacaagtcgaatgggttctgacgagaatcagaatgacccgcaggcagtgatacgttgcggaactgatacttgggttgccacttgaattcgggaatcaccaacttgggaaccggtatatcgggcaggatgtcactccacagctttctggtcagctgcaaagctccaagcaggtcaggagccgaaatcttgaaatcacaattaggaccagtgctttgagcgcgagagttgcggtacaccggattgcagcactgaaacaccatcagcgacggatgtctcacgcttgccagcacggtgggatctgcaatcatgcccacatccagatcttcagcattggcaatgctgaacggggtcatcttgcaggtctgcctacccatggcgggcacccaattaggcttgtggttgcaatcgcagtgcagggggatcagtatcatcttggcctgatcctgtctgattcctggatacacggctctcatgaaagcatcatattgcttgaaagcctgctgggctttactaccctcggtataaaacatcccgcaggacctgctcgaaaactggttagctgcacagccggcatcattcacacagcagcgggcgtcattgttagctatttgcaccacacttctgccccagcggttttgggtgattttggttcgctcgggattctcctttaaggctcgttgtccgttctcgctggccacatccatctcgataatctgctccttctgaatcataatattgccatgcaggcacttcagcttgccctcataatcattgcagccatgaggccacaacgcacagcctgtacattcccaattatggtgggcgatctgagaaaaagaatgtatcattccctgcagaaatcttcccatcatcgtgctcagtgtcttgtgactagtgaaagttaactggatgcctcggtgctcctcgtttacgtactggtgacagatgcgcttgtattgttcgtgttgctcaggcattagtttaaaagaggttctaagttcgttatccagcctgtacttctccatcagcagacacatcacttccatgcctttctcccaagcagacaccaggggcaagctaatcggattcttaacagtgcaggcagcagctcctttagccagagggtcatctttagcgatcttctcaatgcttcttttgccatccttctcaacgatgcgcacgggcgggtagctgaaacccactgctacaagttgcgcctcttctctttcttcttcgctgtcttgactgatgtcttgcatggggatatgtttggtcttccttggcttctttttggggggtatcggaggaggaggactgtcgctccgttccggagacagggaggattgtgacgtttcgctcaccattaccaactgactgtcggtagaagaacctgaccccacacggcgacaggtgtttctcttcgggggcagaggtggaggcgattgcgaagggctgcggtccgacctggaaggcggatgactggcagaaccccttccgcgttcgggggtgtgctccctgtggcggtcgcttaactgatttccttcgcggctggccattgtgttctcctaggcagagaaacaacagacatggaaactcagccattgctgtcaacatcgccacgagtgccatcacatctcgtcctcagcgacgaggaaaaggagcagagcttaagcattccaccgcccagtcctgccaccacctctaccctagaagataaggaggtcgacgcatctcatgacatgcagaataaaaaagcgaaagagtctgagacagacatcgagcaagacccgggctatgtgacaccggtggaacacgaggaagagttgaaacgctttctagagagagaggatgaaaactgcccaaaacaacgagcagataactatcaccaagatgctggaaatagggatcagaacaccgactacctcatagggcttgacggggaagacgcgctccttaaacatctagcaagacagtcgctcatagtcaaggatgcattattggacagaactgaagtgcccatcagtgtggaagagctcagccgcgcctacgagcttaacctcttttcacctcgtactccccccaaacgtcagccaaacggcacctgcgagccaaatcctcgcttaaacttttatccagcttttgctgtgccagaagtactggctacctatcacatcttttttaaaaatcaaaaaattccagtctcctgccgcgctaatcgcacccgcgccgatgccctactcaatctgggacctggttcacgcttacctgatatagcttccttggaagaggttccaaagatcttcgagggtctgggcaataatgagactcgggccgcaaatgctctgcaaaagggagaaaatggcatggatgagcatcacagcgttctggtggaattggaaggcgataatgccagactcgcagtactcaagcgaagcatcgaggtcacacacttcgcatatcccgctgtcaacctgccccctaaagtcatgacggcggtcatggaccagttactcattaagcgcgcaagtcccctttcagaagacatgcatgacccagatgcctgtgatgagggtaaaccagtggtcagtgatgagcagctaacccgatggctgggcaccgactctcccagggatttggaagagcgtcgcaagcttatgatggccgtggtgctggttaccgtagaactagagtgtctccgacgtttctttaccgattcagaaaccttgcgcaaactcgaagagaatctgcactacacttttagacacggctttgtgcggcaggcatgcaagatatctaacgtggaactcaccaacctggtttcctacatgggtattctgcatgagaatcgcctaggacaaagcgtgctgcacagcaccctgaagggggaagcccgccgtgattacatccgcgattgtgtctatctgtacctgtgccacacgtggcaaaccggcatgggtgtatggcagcaatgtttagaagaacagaacttgaaagagcttgacaagctcttacagaaatctcttaaggttctgtggacagggttcgacgagcgcaccgtcgcttccgacctggcagacctcatcttcccagagcgtctcagggttactttgcgaaacggattgcctgactttatgagccagagcatgcttaacaattttcgctctttcatcctggaacgctccggtatcctgcccgccacctgctgcgcactgccctccgactttgtgcctctcacctaccgcgagtgccccccgccgctatggagtcactgctacctgttccgtctggccaactatctctcctaccactcggatgtgatcgaggatgtgagcggagacggcttgctggagtgtcactgccgctgcaatctgtgcacgccccaccggtccctagcttgcaacccccagttgatgagcgaaacccagataataggcacctttgaattgcaaggccccagcagccaaggcgatgggtcttctcctgggcaaagtttaaaactgaccccgggactgtggacctccgcctacttgcgcaagtttgctccggaagattaccacccctatgaaatcaagttctatgaggaccaatcacagcctccaaaggccgaactttcggcctgcgtcatcacccagggggcaattctggcccaattgcaagccatccaaaaatcccgccaagaatttctactgaaaaagggtaagggggtctaccttgacccccagaccggcgaggaactcaacacaaggttccctcaggatgtcccaacgacgagaaaacaagaagttgaaggtgcagccgccgcccccagaagatatggaggaagattgggacagtcaggcagaggaggcggaggaggacagtctggaggacagtctggaggaagacagtttggaggaggaaaacgaggaggcagaggaggtggaagaagtaaccgccgacaaacagttatcctcggctgcggagacaagcaacagcgctaccatctccgctccgagtcgaggaacccggcggcgtcccagcagtagatgggacgagaccggacgcttcccgaacccaaccagcgcttccaagaccggtaagaaggatcggcagggatacaagtcctggcgggggcataagaatgccatcatctcctgcttgcatgagtgcgggggcaacatatccttcacgcggcgctacttgctattccaccatggggtgaactttccgcgcaatgttttgcattactaccgtcacctccacagcccctactatagccagcaaatcccggcagtctcgacagataaagacagcggcggcgacctccaacagaaaaccagcagcggcagttagaaaatacacaacaagtgcagcaacaggaggattaaagattacagccaacgagccagcgcaaacccgagagttaagaaatcggatctttccaaccctgtatgccatcttccagcagagtcggggtcaagagcaggaactgaaaataaaaaaccgatctctgcgttcgctcaccagaagttgtttgtatcacaagagcgaagatcaacttcagcgcactctcgaggacgccgaggctctcttcaacaagtactgcgcgctgactcttaaagagtaggcagcgaccgcgcttattcaaaaaaggcgggaattacatcatcctcgacatgagtaaagaaattcccacgccttacatgtggagttatcaaccccaaatgggattggcggcaggcgcctcccaggactactccacccgcatgaattggctcagcgccgggccttctatgatttctcgagttaatgatatacgcgcctaccgaaaccaaatacttttggaacagtcagctcttaccaccacgccccgccaacaccttaatcccagaaattggcccgccgccctagtgtaccaggaaagtcccgctcccaccactgtattacttcctcgagacgcccaggccgaagtccaaatgactaatgcaggtgcgcagttagctggcggctccaccctatgtcgtcacaggcctcggcataatataaaacgcctgatgatcagaggccgaggtatccagctcaacgacgagtcggtgagctctccgcttggtctacgaccagacggaatctttcagattgccggctgcgggagatcttccttcacccctcgtcaggctgttctgactttggaaagttcgtcttcgcaaccccgctcgggcggaatcgggaccgttcaatttgtggaggagtttactccctctgtctacttcaaccccttctccggatctcctgggcattacccggacgagttcataccgaacttcgacgcgattagcgagtcagtggacggctacgattgatgtctggtgacgcggctgagctatctcggctgcgacatctagaccactgccgccgctttcgctgctttgcccgggaactcattgagttcatctacttcgaactccccaaggatcaccctcaaggtccggcccacggagtgcggatttctatcgaaggcaaaatagactctcgcctgcaacgaattttctcccagcggcccgtgctgatcgagcgagaccagggaaacaccacggtttccatctactgcatttgtaatcaccccggattgcatgaaagcctttgctgtcttatgtgtactgagtttaataaaaactgaattaagactctcctacggactgccgcttcttcaacccggattttacaaccagaagaacgaaacttttcctgtcgtccaggactctgttaacttcacctttcctactcacaaactagaagctcaacgactacaccgcttttccagaagcattttccctactaatactactttcaaaaccggaggtgagctccaaggtcttcctacagaaaacccttgggtggaagcgggccttgtagtgctaggaattcttgcgggtgggcttgtgattattctttgctacctatacacaccttgcttcactttcttagtggtgttgtggtattggtttaaaaaatggggcccatactagtcttgcttgttttactttcgcttttggaaccgggttctgccaattacgatccatgtctagacttcgacccagaaaactgcacacttacttttgcacccgacacaagccgcatctgtggagttcatcgcctctcttacgaacttggcccccaacgacaaaaatttacctgcatggtgggaatcaaccccatagttatcacccagcaaagtggagatactaagggttgcattcactgctcctgcgattccatcgagtgcacctacaccctgctgaagaccctatgcggcctaagagacctgctaccaatgaattaaaaaatgattaataaaaaatcacttacttgaaatcagcaataaggtctctgttgaaattttctcccagcagcacctcacttccctcttcccaactctggtattctaaaccccgttcagcggcatactttctccatactttaaaggggatgtcaaattttagctcctctcctgtacccacaatcttcatgtctttcttcccagatgaccaagagagtccggctcagtgactccttcaaccctgtctacccctatgaagatgaaagcacctcccaacacccctttataaacccagggtttatttccccaaatggcttcacacaaagcccaaacggagttcttactttaaaatgtttaaccccactaacaaccacaggcggatctctacagctaaaagtgggagggggacttacagtggatgacaccaacggttttttgaaagaaaacataagtgccaccacaccactcgttaagactggtcactctataggtttaccactaggagccggattgggaacgaatgaaaataaactttgtatcaaattaggacaaggacttacattcaattcaaacaacatttgcattgatgacaatattaacaccttatggacaggagtcaaccccaccgaagccaactgtcaaatcatgaactccagtgaatctaatgattgcaaattaattctaacactagttaaaactggagcactagtcactgcatttgtttatgttataggagtatctaacaattttaatatgctaactacacacagaaatataaattttactgcagagctgtttttcgattctactggtaatttactaactagactctcatccctcaaaactccacttaatcataaatcaggacaaaacatggctactggtgccattactaatgctaaaggtttcatgcccagcacgactgcctatcctttcaatgataattctagagaaaaagaaaactacatttacggaacttgttactacacagctagtgatcgcactgcttttcccattgacatatctgtcatgcttaaccgaagagcaataaatgacgagacatcatattgtattcgtataacttggtcctggaacacaggagatgccccagaggtgcaaacctctgctacaaccctagtcacctccccatttaccttttactacatcagagaagacgactgacaaataaagtttgcgatcgctgctaatcctttctctcttcaggccaccatgggatggagctgtatcatcctcttcttggtagcaacagctacaggtgtccactccgaggttcagctggtggagtctggcggtggcctggtgcagccagggggctcactccgtttgtcctgtgcagcttctggctataccttcaccaactatggtatgaactgggtccgtcaggccccgggtaagggcctggaatgggttggatggattaacacctataccggtgaaccgacctatgctgcggatttcaaacgtcgttttactttttctctggacacctccaagagcacagcttacctgcagatgaacagcctgcgcgctgaggacactgccgtctattactgtgcaaagtacccgcactattatgggagcagccactggtatttcgacgtctggggtcaaggaaccctggtcaccgtctcctcgggtggcggtggctcgggcggtggtggatctggtggcggcggatctgatatccagatgacccagtccccgagctccctgtccgcctctgtgggcgatagggtcaccatcacctgcagcgcaagtcaggatattagcaactatttaaactggtatcaacagaaaccaggaaaagctccgaaagtcctgatttacttcacctcctctctccactctggagtcccttctcgcttctctggatccggttctgggacggatttcactctgaccatcagcagtctgcagccagaagacttcgcaacttattactgtcaacagtatagcaccgtgccgtggacgtttggacagggtaccaaggtggagatcaaacgacatcatcaccaccaccattaagctagcttgactgactgagatacagcgtaccttcagctcacagacatgataagatacattgatgagtttggacaaaccacaactagaatgcagtgaaaaaaatgctttatttgtgaaatttgtgatgctattgctttatttgtaaccattataagctgcaataaacaagttaacaacaacaattgcattcattttatgtttcaggttcagggggaggtgtgggaggttttttaaagcaagtaaaacctctacaaatgtggtagtcgtcagctatcctgcaggaacttgtttatttgaaaatcaattcacaaaatccgagtagttattttgcctcccccttcccatttaacagaatacaccaatctctccccacgcacagctttaaacatttggataccattagatatagacatggttttagattccacattccaaacagtttcagagcgagccaatctggggtcagtgatagataaaaatccatcgggatagtcttttaaagcgctttcacagtccaactgctgcggatgcgactccggagtctggatcacggtcatctggaagaagaacgatgggaatcataatccgaaaacggtatcggacgattgtgtctcatcaaacccacaagcagccgctgtctgcgtcgctccgtgcgactgctgtttatgggatcagggtccacagtgtcctgaagcatgattttaatagcccttaacatcaactttctggtgcgatgcgcgcagcaacgcattctgatttcactcaaatctttgcagtaggtacaacacattattacaatattgtttaataaaccataattaaaagcgctccagccaaaactcatatctgatataatcgcccctgcatgaccatcataccaaagtttaatataaattaaatgacgttccctcaaaaacacactacccacatacatgatctcttttggcatgtgcatattaacaatctgtctgtaccatggacaacgttggttaatcatgcaacccaatataaccttccggaaccacactgccaacaccgctcccccagccatgcattgaagtgaaccctgctgattacaatgacaatgaagaacccaattctctcgaccgtgaatcacttgagaatgaaaaatatctatagtggcacaacatagacataaatgcatgcatcttctcataatttttaactcctcaggatttagaaacatatcccagggaataggaagctcttgcagaacagtaaagctggcagaacaaggaagaccacgaacacaacttacactatgcatagtcatagtatcacaatctggcaacagcgggtggtcttcagtcatagaagctcgggtttcattttcctcacaacgtggtaactgggctctggtgtaagggtgatgtctggcgcatgatgtcgagcgtgcgcgcaaccttgtcataatggagttgcttcctgacattctcgtattttgtatagcaaaacgcggccctggcagaacacactcttcttcgccttctatcctgccgcttagcgtgttccgtgtgatagttcaagtacaaccacactcttaagttggtcaaaagaatgctggcttcagttgtaatcaaaactccatcgcatctaatcgttctgaggaaatcatccaagcaatgcaactggattgtgtttcaagcaggagaggagagggaagagacggaagaaccatgttaatttttattccaaacgatctcgcagtacttcaaattgtagatcgcgcagatggcatctctcgcccccactgtgttggtgaaaaagcacagctagatcaaaagaaatgcgattttcaaggtgctcaacggtggcttccagcaaagcctccacgcgcacatccaagaacaaaagaataccaaaagaaggagcattttctaactcctcaatcatcatattacattcctgcaccattcccagataattttcagctttccagccttgaattattcgtgtcagttcttgtggtaaatccaatccacacattacaaacaggtcccggagggcgccctccaccaccattcttaaacacaccctcataatgacaaaatatcttgctcctgtgtcacctgtagcgaattgagaatggcaacatcaattgacatgcccttggctctaagttcttctttaagttctagttgtaaaaactctctcatattatcaccaaactgcttagccagaagccccccgggaacaagagcaggggacgctacagtgcagtacaagcgcagacctccccaattggctccagcaaaaacaagattggaataagcatattgggaaccgccagtaatatcatcgaagttgctggaaatataatcaggcagagtttcttgtaaaaattgaataaaagaaaaatttgccaaaaaaacattcaaaacctctgggatgcaaatgcaataggttaccgcgctgcgctccaacattgttagttttgaattagtctgcaaaaataaaaaaaaaaacaagcgtcatatcatagtagcctgacgaacagatggataaatcagtctttccatcacaagacaagccacagggtctccagctcgaccctcgtaaaacctgtcatcatgattaaacaacagcaccgaaagttcctcgcggtgaccagcatgaataattcttgatgaagcatacaatccagacatgttagcatcagttaacgagaaaaaacagccaacatagcctttgggtataattatgcttaatcgtaagtatagcaaagccacccctcgcggatacaaagtaaaaggcacaggagaataaaaaatataattatttctctgctgctgttcaggcaacgtcgcccccggtccctctaaatacacatacaaagcctcatcagccatggcttaccagacaaagtacagcgggcacacaaagcacaagctctaaagtgactctccaacctctccacaatatatatatacacaagccctaaactgacgtaatgggagtaaagtgtaaaaaatcccgccaaacccaacacacaccccgaaactgcgtcaccagggaaaagtacagtttcacttccgcaatcccaacaggcgtaacttcctctttctcacggtacgtgatatcccactaacttgcaacgtcattttcccacggtcgcaccgccccttttagccgttaaccccacagccaatcaccacacgatccacactttttaaaatcacctcatttacatattggcaccattccatctataaggtatattatatagataga

SEQ ID NO: 7 - DNA, 34117 bp, Artificial Sequence
  NG-76 virus genome sequence
tctatctatataatataccttatagatggaatggtgccaatatgtaaatgaggtgattttaaaaagtgtggatcgtgtggtgattggctgtggggttaacggctaaaaggggcggtgcgaccgtgggaaaatgacgttttgtgggggtggagtttttttgcaagttgtcgcgggaaatgtgacgcataaaaaggcttttttctcacggaactacttagttttcccacggtatttaacaggaaatgaggtagttttgaccggatgcaagtgaaaattgttgattttcgcgcgaaaactgaatgaggaagtgtttttctgaataatgtggtatttatggcagggtggagtatttgttcagggccaggtagactttgacccattacgtggaggtttcgattaccgtgttttttacctgaatttccgcgtaccgtgtcaaagtcttctgtttttacgtaggtgtcagctgatcgctagggtatttatacctcagggtttgtgtcaagaggccactcttgagtgccagcgagaagagttttctcctctgcgccggcagtttaataataaaaaaatgagagatttgcgatttctgcctcaggaaataatctctgctgagactggaaatgaaatattggagcttgtggtgcacgccctgatgggagacgatccggagccacctgtgcagctttttgagcctcctacgcttcaggaactgtatgatttagaggtagagggatcggaggattctaatgaggaagctgtaaatggcttttttaccgattctatgcttttagctgctaatgaagggttagaattagatccgcctttggacacttttgatactccaggggtaattgtggaaagcggtacaggtgtaagaaaattacctgatttgagttccgtggactgtgatttgcactgctatgaagacgggtttcctccgagtgatgaggaggaccatgaaaaggagcagtccatgcagactgcagcgggtgagggagtgaaggctgccaatgttggttttcagttggattgcccggagcttcctggacatggctgtaagtcttgtgaatttcacaggaaaaatactggagtaaaggaactgttatgttcgctttgttatatgagaacgcactgccactttatttacagtaagtgtgtttaagttaaaatttaaaggaatatgctgtttttcacatgtatattgagtgtgagttttgtgcttcttattataggtcctgtgtctgatgctgatgaatcaccatctcctgattctactacctcacctcctgagattcaagcacctgttcctgtggacgtgcgcaagcccattcctgtgaagcttaagcctgggaaacgtccagcagtggaaaaacttgaggacttgttacagggtggggacggacctttggacttgagtacacggaaacgtccaagacaataagtgttccatatccgtgtttacttaaggtgacgtcaatatttgtgtgacagtgcaatgtaataaaaatatgttaactgttcactggtttttattgctttttgggcggggactcaggtatataagtagaagcagacctgtgtggttagctcataggagctggctttcatccatggaggtttgggccattttggaagaccttaggaagactaggcaactgttagagaacgcttcggacggagtctccggtttttggagattctggttcgctagtgaattagctagggtagtttttaggataaaacaggactataaacaagaatttgaaaagttgttggtagattgcccaggactttttgaagctcttaatttgggccatcaggttcactttaaagaaaaagttttatcagttttagacttttcaaccccaggtagaactgctgctgctgtggcttttcttacttttatattagataaatggatcccgcagactcatttcagcaggggatacgttttggatttcatagccacagcattgtggagaacatggaaggttcgcaagatgaggacaatcttaggttactggccagtgcagcctttgggtgtagcgggaatcctgaggcatccaccggtcatgccagcggttctggaggaggaacagcaagaggacaacccgagagccggcctggaccctccagtggaggaggcggagtagctgacttgtctcctgaactgcaacgggtgcttactggatctacgtccactggacgggataggggcgttaagagggagagggcatctagtggtactgatgctagatctgagttggctttaagtttaatgagtcgcagacgtcctgaaaccatttggtggcatgaggttcagaaagagggaagggatgaagtttctgtattgcaggagaaatattcactggaacaggtgaaaacatgttggttggagcctgaggatgattgggaggtggccattaaaaattatgccaagatagctttgaggcctgataaacagtataagattactagacggattaatatccggaatgcttgttacatatctggaaatggggctgaggtggtaatagatactcaagacaaggcagttattagatgctgcatgatggatatgtggcctggggtagtcggtatggaagcagtaacttttgtaaatgttaagtttaggggagatggttataatggaatagtgtttatggccaataccaaacttatattgcatggttgtagcttttttggtttcaacaatacctgtgtagatgcctggggacaggttagtgtacggggatgtagtttctatgcgtgttggattgccacagctggcagaaccaagagtcaattgtctctgaagaaatgcatatttcaaagatgtaacctgggcattctgaatgaaggcgaagcaagggtccgccactgcgcttctacagatactggatgttttattttgattaagggaaatgccagcgtaaagcataacatgatttgcggtgcttccgatgagaggccttatcaaatgctcacttgtgctggtgggcattgtaatatgctggctactgtgcatattgtttcccatcaacgcaaaaaatggcctgtttttgatcacaatgtgatgacgaagtgtaccatgcatgcaggtgggcgtagaggaatgtttatgccttaccagtgtaacatgaatcatgtgaaagtgttgttggaaccagatgccttttccagaatgagcctaacaggaatttttgacatgaacatgcaaatctggaagatcctgaggtatgatgatacgagatcgagggtacgcgcatgcgaatgcggaggcaagcatgccaggttccagccggtgtgtgtagatgtgactgaagatctcagaccggatcatttggttattgcccgcactggagcagagttcggatccagtggagaagaaactgactaaggtgagtattgggaaaactttggggtgggattttcagatggacagattgagtaaaaatttgttttttctgtcttgcagctgtcatgagtggaaacgcttcttttaaggggggagtcttcagcccttatctgacagggcgtctcccatcctgggcaggagttcgtcagaatgttatgggatctactgtggatggaagacccgtccaacccgccaattcttcaacgctgacctatgctactttaagttcttcacctttggacgcagctgcagctgccgccgccgcttctgttgccgctaacactgtgcttggaatgggttactatggaagcatcatggctaattccacttcctctaataacccttctaccctgactcaggacaagttacttgtccttttggcccagctggaggctttgacccaacgtctgggtgaactttctcagcaggtggtcgagttgcgagtacaaactgagtctgctgtcggcacggcaaagtctaaataaaaaaatcccagaatcaatgaataaataaacaagcttgttgttgatttaaaatcaagtgtttttatttcatttttcgcgcacggtatgccctagaccaccgatctctatcattgagaactcggtggattttttccaggatcctatagaggtgggattgaatgtttagatacatgggcattaggccgtctttggggtggagatagctccattgaagggattcatgctccggggtagtgttgtaaatcacccagtcataacaaggtcgcagtgcatggtgttgcacaatatcttttagaagtaggctgattgccacagataagcccttggtgtaggtgtttacaaaccggttgagctgggatgggtgcattcggggtgaaattatgtgcattttggattggatttttaagttggcaatattgccgccaagatcccgtcttgggttcatgttatgaaggaccaccaagacggtgtatccggtacatttaggaaatttatcgtgcagcttggatggaaaagcgtggaaaaatttggagacacccttgtgtcctccaagattttccatgcactcatccatgataatagcaatggggccgtgggcagcggcgcgggcaaacacgttccgtgggtctgacacatcatagttatgttcctgagttaaatcatcataagccattttaatgaatttggggcggagagtaccagattggggtatgaatgttccttcgggccccggagcatagttcccctcacagatttgcatttcccaagctttcagttccgagggtggaatcatgtccacctggggggctatgaaaaacaccgtttctggggcgggggtgattaattgtgatgatagcaaatttctgagcaattgagatttgccacatccggtggggccataaatgattccgattacgggttgcaggtggtagtttagggaacggcaactgccgtcttctcgaagcaagggggccacctcgttcatcatttcccttacatgcatattttcccgcaccaaatccattaggaggcgctctcctcctagtgatagaagttcttgtagtgaggaaaagtttttcagcggtttcagaccgtcagccatgggcattttggagagagtttgctgcaaaagttctagtctgttccacagttcagtgatgtgttctatggcatctcgatccagcagacctcctcgtttcgcgggtttggacggctcctggaatagggtatgagacgatgggcgtccagcgctgccagggttcggtccttccagggtctcagtgttcgagtcagggttgtttccgtcacagtgaaggggtgtgcgcctgcttgggcgcttgccagggtgcgcttcagactcatcctgctggtcgaaaacttctgtcgcttggcgccctgtatgtcggccaagtagcagtttaccatgagttcgtagttgagcgcctcggctgcgtggcctttggcgcggagcttacctttggaagttttcttgcataccgggcagtataggcatttcagcgcatacaacttgggcgcaaggaaaacggattctggggagtatgcatctgcgccgcaggaggcgcaaacagtttcacattccaccagccaggttaaatccggttcattggggtcaaaaacaagttttccgccatattttttgatgcgtttcttacctttggtctccatgagttcgtgtcctcgttgagtgacaaacaggctgtccgtgtccccgtagactgattttacaggcctcttctccagtggagtgcctcggtcttcttcgtacaggaactctgaccactctgatacaaaggcgcgcgtccaggccagcacaaaggaggctatgtgggaggggtagcgatcgttgtcaaccagggggtccaccttttccaaagtatgcaaacacatgtcaccctcttcaacatccaggaatgtgattggcttgtaggtgtatttcacgtgacctggggtccccgctgggggggtataaaagggggcggttctttgctcttcctcactgtcttccggatcgctgtccaggaacgtcagctgttggggtaggtattccctctcgaaggcgggcatgacctctgcactcaggttgtcagtttctaagaacgaggaggatttgatattgacagtgccggttgagatgcctttcatgaggttttcgtccatctggtcagaaaacacaatttttttattgtcaagtttggtggcaaatgatccatacagggcgttggataaaagtttggcaatggatcgcatggtttggttcttttccttgtccgcgcgctctttggcggcgatgttgagttggacatactcgcgtgccaggcacttccattcggggaagatagttgttaattcatctggcacgattctcacttgccaccctcgattatgcaaggtaattaaatccacactggtggccacctcgcctcgaaggggttcattggtccaacagagcctacctcctttcctagaacagaaagggggaagtgggtctagcataagttcatcgggagggtctgcatccatggtaaagattcccggaagtaaatccttatcaaaatagctgatgggagtggggtcatctaaggccatttgccattctcgagctgccagtgcgcgctcatatgggttaaggggactgccccatggcatgggatgggtgagtgcagaggcatacatgccacagatgtcatagacgtagatgggatcctcaaagatgcctatgtaggttggatagcatcgcccccctctgatacttgctcgcacatagtcatatagttcatgtgatggcgctagcagccccggacccaagttggtgcgattgggtttttctgttctgtagacgatctggcgaaagatggcgtgagaattggaagagatggtgggtctttgaaaaatgttgaaatgggcatgaggtagacctacagagtctctgacaaagtgggcataagattcttgaagcttggttaccagttcggcggtgacaagtacgtctagggcgcagtagtcaagtgtttcttgaatgatgtcataacctggttggtttttcttttcccacagttcgcggttgagaaggtattcttcgcgatccttccagtactcttctagcggaaacccgtctttgtctgcacggtaagatcctagcatgtagaactgattaactgccttgtaagggcagcagcccttctctacgggtagagagtatgcttgagcagcttttcgtagcgaagcgtgagtaagggcaaaggtgtctctgaccatgactttgaggaattggtatttgaagtcgatgtcgtcacaggctccctgttcccagagttggaagtctacccgtttcttgtaggcggggttgggcaaagcgaaagtaacatcattgaagagaatcttgccggccctgggcatgaaattgcgagtgatgcgaaaaggctgtggtacttccgctcggttattgataacctgggcagctaggacgatctcgtcgaaaccgttgatgttgtgtcctacgatgtataattctatgaaacgcggcgtgcctctgacgtgaggtagcttactgagctcatcaaaggttaggtctgtggggtcagataaggcgtagtgttcgagagcccattcgtgcaggtgaggattcgctttaaggaaggaggaccagaggtccactgccagtgctgtttgtaactggtcccggtactgacgaaaatgccgtccgactgccattttttctggggtgacgcaatagaaggtttgggggtcctgccgccagcgatcccacttgagttttatggcgaggtcataggcgatgttgacgagccgctggtctccagagagtttcatgaccagcatgaaggggattagctgcttgccaaaggaccccatccaggtgtaggtttccacatcgtaggtgagaaagagcctttctgtgcgaggatgagagccaatcgggaagaactggatctcctgccaccagttggaggaatggctgttgatgtgatggaagtagaactccctgcgacgcgccgagcattcatgcttgtgcttgtacagacggccgcagtagtcgcagcgttgcacgggttgtatctcgtgaatgagttgtacctggcttcccttgacgagaaatttcagtgggaagccgaggcctggcgattgtatctcgtgctttactatgttgtctgcatcggcctgttcatcttctgtctcgatggtggtcatgctgacgagccctcgcgggaggcaagtccagacctcggcgcggcaggggcggagctcgaggacgagagcgcgcaggctggagctgtccagggtcctgagacgctgcggactcaggttagtaggcagtgtcaggagattaacttgcatgatcttttggagggcgtgcgggaggttcagatagtacttgatctcaacgggtccgttggtggagatgtcgatggcttgcagggttccgtgtcccttgggcgctaccaccgtgcccttgtttttcattttggacggcggtggctctgttgcttcttgcatgtttagaagcggtgtcgagggcgcgcaccgggcggcaggggcggctcgggacccggcggcatggctggcagtggtacgtcggcgccgcgcgcgggtaggttctggtactgcgccctgagaagactcgcatgcgcgacgacgcggcggttgacatcctggatctgacgcctctgggtgaaagctaccggccccgtgagcttgaacctgaaagagagttcaacagaatcaatctcggtatcgttgacggcggcttgcctaaggatttcttgcacgtcaccagagttgtcctggtaggcgatctccgccatgaactgctcgatctcttcctcttgaagatctccgcggcccgctctctcgacggtggccgcgaggtcgttggagatgcgcccaatgagttgagagaatgcattcatgcccgcctcgttccagacgcggctgtagaccacggcccccacgggatctctcgcgcgcatgaccacctgggcgaggttgagctccacgtggcgggtgaagaccgcatagttgcataggcgctggaaaaggtagttgagtgtggtggcgatgtgctcggtgacgaagaaatacatgatccatcgtctcagcggcatctcgctgacatcgcccagagcttccaagcgctccatggcctcgtagaagtccacggcaaaattaaaaaactgggagtttcgcgcggacacggtcaactcctcttccagaagacggataagttcggcgatggtggtgcgcacctcgcgctcgaaagcccctgggatttcttcctcaatctcttcttcttccactaacatctcttcctcttcaggtggggctgcaggaggagggggaacgcggcgacgccggcggcgcacgggcagacggtcgatgaatctttcaatgacctctccgcggcggcggcgcatggtttcagtgacggcgcggccgttctcgcgcggtcgcagagtaaaaacaccgccgcgcatctccttaaagtggtgactgggaggttctccgtttgggagggagagggcgctgattatacattttattaattggcccgtagggactgcacgcagagatctgatcgtgtcaagatccacgggatctgaaaacctttcgacgaaagcgtctaaccagtcacagtcacaaggtaggctgagtacggcttcttgtgggcgggggtggttatgtgttcggtctgggtcttctgtttcttcttcatctcgggaaggtgagacgatgctgctggtgatgaaattaaagtaggcagttctaagacggcggatggtggcgaggagcaccaggtctttgggtccggcttgctggatacgcaggcgattggccattccccaagcattatcctgacatctagcaagatctttgtagtagtcttgcatgagccgttctacgggcacttcttcctcacccgttctgccatgcatacgtgtgagtccaaatccgcgcattggttgtaccagtgccaagtcagctacgactctttcggcgaggatggcttgctgtacttgggtaagggtggcttgaaagtcatcaaaatccacaaagcggtggtaagctcctgtattaatggtgtaagcacagttggccatgactgaccagttaactgtctggtgaccagggcgcacgagctcggtgtatttaaggcgcgaataggcgcgggtgtcaaagatgtaatcgttgcaggtgcgcaccagatactggtaccctataagaaaatgcggcggtggttggcggtagagaggccatcgttctgtagctggagcgccaggggcgaggtcttccaacataaggcggtgatagccgtagatgtacctggacatccaggtgattcctgcggcggtagtagaagcccgaggaaactcgcgtacgcggttccaaatgttgcgtagcggcatgaagtagttcattgtaggcacggtttgaccagtgaggcgcgcgcagtcattgatgctctatagacacggagaaaatgaaagcgttcagcgactcgactccgtagcctggaggaacgtgaacgggttgggtcgcggtgtaccccggttcgagacttgtactcgagccggccggagccgcggctaacgtggtattggcactcccgtctcgacccagcctacaaaaatccaggatacggaatcgagtcgttttgctggtttccgaatggcagggaagtgagtcctattttttttttttgccgctcagatgcatcccgtgctgcgacagatgcgcccccaacaacagcccccctcgcagcagcagcagcagcaatcacaaaaggctgtccctgcaactactgcaactgccgccgtgagcggtgcgggacagcccgcctatgatctggacttggaagagggcgaaggactggcacgtctaggtgcgccttcacccgagcggcatccgcgagttcaactgaaaaaagattctcgcgaggcgtatgtgccccaacagaacctatttagagacagaagcggcgaggagccggaggagatgcgagcttcccgctttaacgcgggtcgtgagctgcgtcacggtttggaccgaagacgagtgttgcgggacgaggatttcgaagttgatgaaatgacagggatcagtcctgccagggcacacgtggctgcagccaaccttgtatcggcttacgagcagacagtaaaggaagagcgtaacttccaaaagtcttttaataatcatgtgcgaaccctgattgcccgcgaagaagttacccttggtttgatgcatttgtgggatttgatggaagctatcattcagaaccctactagcaaacctctgaccgcccagctgtttctggtggtgcaacacagcagagacaatgaggctttcagagaggcgctgctgaacatcaccgaacccgaggggagatggttgtatgatcttatcaacattctacagagtatcatagtgcaggagcggagcctgggcctggccgagaaggtggctgccatcaattactcggttttgagcttgggaaaatattacgctcgcaaaatctacaagactccatacgttcccatagacaaggaggtgaagatagatgggttctacatgcgcatgacgctcaaggtcttgaccctgagcgatgatcttggggtgtatcgcaatgacagaatgcatcgcgcggttagcgccagcaggaggcgcgagttaagcgacagggaactgatgcacagtttgcaaagagctctgactggagctggaaccgagggtgagaattacttcgacatgggagctgacttgcagtggcagcctagtcgcagggctctgagcgccgcgacggcaggatgtgagcttccttacatagaagaggcggatgaaggcgaggaggaagagggcgagtacttggaagactgatggcacaacccgtgttttttgctagatggaacagcaagcaccggatcccgcaatgcgggcggcgctgcagagccagccgtccggcattaactcctcggacgattggacccaggccatgcaacgtatcatggcgttgacgactcgcaaccccgaagcctttagacagcaaccccaggccaaccgtctatcggccatcatggaagctgtagtgccttcccgctctaatcccactcatgagaaggtcctggccatcgtgaacgcgttggtggagaacaaagctattcgtccagatgaggccggactggtatacaacgctctcttagaacgcgtggctcgctacaacagtagcaatgtgcaaaccaatttggaccgtatgataacagatgtacgcgaagccgtgtctcagcgcgaaaggttccagcgtgatgccaacctgggttcgctggtggcgttaaatgctttcttgagtactcagcctgctaatgtgccgcgtggtcaacaggattatactaactttttaagtgctttgagactgatggtatcagaagtacctcagagcgaagtgtatcagtccggtcctgattacttctttcagactagcagacagggcttgcagacggtaaatctgagccaagcttttaaaaaccttaaaggtttgtggggagtgcatgccccggtaggagaaagagcaaccgtgtctagcttgttaactccgaactcccgcctattattactgttggtagctcctttcaccgacagcggtagcatcgaccgtaattcctatttgggttacctactaaacctgtatcgcgaagccatagggcaaagtcaggtggacgagcagacctatcaagaaattacccaagtcagtcgcgctttgggacaggaagacactggcagtttggaagccactctgaacttcttgcttaccaatcggtctcaaaagatccctcctcaatatgctcttactgcggaggaggagaggatccttagatatgtgcagcagagcgtgggattgtttctgatgcaagagggggcaactccgactgcagcactggacatgacagcgcgaaatatggagcccagcatgtatgccagtaaccgacctttcattaacaaactgctggactacttgcacagagctgccgctatgaactctgattatttcaccaatgccatcttaaacccgcactggctgcccccacctggtttctacacgggcgaatatgacatgcccgaccctaatgacggatttctgtgggacgacgtggacagcgatgttttttcacctctttctgatcatcgcacgtggaaaaaggaaggcggcgatagaatgcattcttctgcatcgctgtccggggtcatgggtgctaccgcggctgagcccgagtctgcaagtccttttcctagtctacccttttctctacacagtgtacgtagcagcgaagtgggtagaataagtcgcccgagtttaatgggcgaagaggagtatctaaacgattccttgctcagaccggcaagagaaaaaaatttcccaaacaatggaatagaaagtttggtggataaaatgagtagatggaagacttatgctcaggatcacagagacgagcctgggatcatggggattacaagtagagcgagccgtagacgccagcgccatgacagacagaggggtcttgtgtgggacgatgaggattcggccgatgatagcagcgtgctggacttgggtgggagaggaaggggcaacccgtttgctcatttgcgccctcgcttgggtggtatgttgtaaaaaaaaataaaaaaaaaactcaccaaggccatggcgacgagcgtacgttcgttcttctttattatctgtgtctagtataatgaggcgagtcgtgctaggcggagcggtggtgtatccggagggtcctcctccttcgtacgagagcgtgatgcagcagcagcaggcgacggcggtgatgcaatccccactggaggctccctttgtgcctccgcgatacctggcacctacggagggcagaaacagcattcgttattcggaactggcacctcagtacgataccaccaggttgtatctggtggacaacaagtcggcggacattgcttctctgaactatcagaatgaccacagcaacttcttgaccacggtggtgcaaaacaatgactttacccctacggaagccagcacccagaccattaactttgatgaacgatcgcggtggggcggtcagctaaagaccatcatgcatactaacatgccaaacgtgaacgagtatatgtttagtaacaagttcaaagcgcgtgtgatggtgtccagaaaacctcccgacggtgctgcagttggggatacttatgatcacaagcaggatattttgaaatatgagtggttcgagtttactttgccagaaggcaacttttcagttactatgactattgatttgatgaacaatgccatcatagataattacttgaaagtgggtagacagaatggagtgcttgaaagtgacattggtgttaagttcgacaccaggaacttcaagctgggatgggatcccgaaaccaagttgatcatgcctggagtgtatacgtatgaagccttccatcctgacattgtcttactgcctggctgcggagtggattttaccgagagtcgtttgagcaaccttcttggtatcagaaaaaaacagccatttcaagagggttttaagattttgtatgaagatttagaaggtggtaatattccggccctcttggatgtagatgcctatgagaacagtaagaaagaacaaaaagccaaaatagaagctgctacagctgctgcagaagctaaggcaaacatagttgccagcgactctacaagggttgctaacgctggagaggtcagaggagacaattttgcgccaacacctgttccgactgcagaatcattattggccgatgtgtctgaaggaacggacgtgaaactcactattcaacctgtagaaaaagatagtaagaatagaagctataatgtgttggaagacaaaatcaacacagcctatcgcagttggtatctttcgtacaattatggcgatcccgaaaaaggagtgcgttcctggacattgctcaccacctcagatgtcacctgcggagcagagcaggtctactggtcgcttccagacatgatgaaggatcctgtcactttccgctccactagacaagtcagtaactaccctgtggtgggtgcagagcttatgcccgtcttctcaaagagcttctacaacgaacaagctgtgtactcccagcagctccgccagtccacctcgcttacgcacgtcttcaaccgctttcctgagaaccagattttaatccgtccgccggcgcccaccattaccaccgtcagtgaaaacgttcctgctctcacagatcacgggaccctgccgttgcgcagcagtatccggggagtccaacgtgtgaccgttactgacgccagacgccgcacctgtccctacgtgtacaaggcactgggcatagtcgcaccgcgcgtcctttcaagccgcactttctaaaaaaaaaaaaaatgtccattcttatctcgcccagtaataacaccggttggggtctgcgcgctccaagcaagatgtacggaggcgcacgcaaacgttctacccaacatcctgtccgtgttcgcggacattttcgcgctccatggggcgccctcaagggccgcactcgcgttcgaaccaccgtcgatgatgtaatcgatcaggtggttgccgacgcccgtaattatactcctactgcgcctacatctactgtggatgcagttattgacagtgtagtggctgacgctcgcaactatgctcgacgtaagagccggcgaaggcgcattgccagacgccaccgagctaccactgccatgcgagccgcaagagctctgctacgaagagctagacgcgtggggcgaagagccatgcttagggcggccagacgtgcagcttcgggcgccagcgccggcaggtcccgcaggcaagcagccgctgtcgcagcggcgactattgccgacatggcccaatcgcgaagaggcaatgtatactgggtgcgtgacgctgccaccggtcaacgtgtacccgtgcgcacccgtccccctcgcacttagaagatactgagcagtctccgatgttgtgtcccagcggcgaggatgtccaagcgcaaatacaaggaagaaatgctgcaggttatcgcacctgaagtctacggccaaccgttgaaggatgaaaaaaaaccccgcaaaatcaagcgggttaaaaaggacaaaaaagaagaggaagatggcgatgatgggctggcggagtttgtgcgcgagtttgccccacggcgacgcgtgcaatggcgtgggcgcaaagttcgacatgtgttgagacctggaacttcggtggtctttacacccggcgagcgttcaagcgctacttttaagcgttcctatgatgaggtgtacggggatgatgatattcttgagcaggcggctgaccgattaggcgagtttgcttatggcaagcgtagtagaataacttccaaggatgagacagtgtcgatacccttggatcatggaaatcccacccctagtcttaaaccggtcactttgcagcaagtgttacccgtaactccgcgaacaggtgttaaacgcgaaggtgaagatttgtatcccactatgcaactgatggtacccaaacgccagaagttggaggacgttttggagaaagtaaaagtggatccagatattcaacctgaggttaaagtgagacccattaagcaggtagcgcctggtctgggggtacaaactgtagacattaagattcccactgaaagtatggaagtgcaaactgaacccgcaaagcctactgccacctccactgaagtgcaaacggatccatggatgcccatgcctattacaactgacgccgccggtcccactcgaagatcccgacgaaagtacggtccagcaagtctgttgatgcccaattatgttgtacacccatctattattcctactcctggttaccgaggcactcgctactatcgcagccgaaacagtacctcccgccgtcgccgcaagacacctgcaaatcgcagtcgtcgccgtagacgcacaagcaaaccgactcccggcgccctggtgcggcaagtgtaccgcaatggtagtgcggaacctttgacactgccgcgtgcgcgttaccatccgagtatcatcacttaatcaatgttgccgctgcctccttgcagatatggccctcacttgtcgccttcgcgttcccatcactggttaccgaggaagaaactcgcgccgtagaagagggatgttgggacgcggaatgcgacgctacaggcgacggcgtgctatccgcaagcaattgcggggtggttttttaccagccttaattccaattatcgctgctgcaattggcgcgataccaggcatagcttccgtggcggttcaggcctcgcaacgacattgacattggaaaaaaacgtataaataaaaaaaaaaaaatacaatggactctgacactcctggtcctgtgactatgttttcttagagatggaagacatcaatttttcatccttggctccgcgacacggcacgaagccgtacatgggcacctggagcgacatcggcacgagccaactgaacgggggcgccttcaattggagcagtatctggagcgggcttaaaaattttggctcaaccataaaaacatacgggaacaaagcttggaacagcagtacaggacaggcgcttagaaataaacttaaagaccagaacttccaacaaaaagtagtcgatgggatagcttccggcatcaatggagtggtagatttggctaaccaggctgtgcagaaaaagataaacagtcgtttggacccgccgccagcaaccccaggtgaaatgcaagtggaggaagaaattcctccgccagaaaaacgaggcgacaagcgtccgcgtcccgatttggaagagacgctggtgacgcgcgtagatgaaccgccttcttatgaggaagcaacgaagcttggaatgcccaccactagaccgatagccccaatggccaccggggtgatgaaaccttctcagttgcatcgacccgtcaccttggatttgccccctccccctgctgctactgctgtacccgcttctaagcctgtcgctgccccgaaaccagtcgccgtagccaggtcacgtcccgggggcgctcctcgtccaaatgcgcactggcaaaatactctgaacagcatcgtgggtctaggcgtgcaaagtgtaaaacgccgtcgctgcttttaattaaatatggagtagcgcttaacttgcctatctgtgtatatgtgtcattacacgccgtcacagcagcagaggaaaaaaggaagaggtcgtgcgtcgacgctgagttactttcaagatggccaccccatcgatgctgccccaatgggcatacatgcacatcgccggacaggatgcttcggagtacctgagtccgggtctggtgcagttcgcccgcgccacagacacctacttcaatctgggaaataagtttagaaatcccaccgtagcgccgacccacgatgtgaccaccgaccgtagccagcggctcatgttgcgcttcgtgcccgttgaccgggaggacaatacatactcttacaaagtgcggtacaccctggccgtgggcgacaacagagtgctggatatggccagcacgttctttgacattaggggtgtgttggacagaggtcccagtttcaaaccctattctggtacggcttacaactccctggctcctaaaggcgctccaaatacatctcagtggattgcagaaggtgtaaaaaatacaactggtgaggaacacgtaacagaagaggaaaccaatactactacttacacttttggcaatgctcctgtaaaagctgaagctgaaattacaaaagaaggactcccagtaggtttggaagtttcagatgaagaaagtaaaccgatttatgctgataaaacatatcagccagaacctcagctgggagatgaaacttggactgaccttgatggaaaaaccgaaaagtatggaggcagggctctcaaacccgatactaagatgaaaccatgctacgggtcctttgccaaacctactaatgtgaaaggcggtcaggcaaaacaaaaaacaacggagcagccaaatcagaaagtcgaatatgatatcgacatggagttttttgatgcggcatcgcagaaaacaaacttaagtcctaaaattgtcatgtatgcagaaaatgtaaatttggaaactccagacactcatgtagtgtacaaacctggaacagaagacacaagttccgaagctaatttgggacaacaatctatgcccaacagacccaactacattggcttcagagataactttattggacttatgtactataacagtactggtaacatgggggtgctggctggtcaagcgtctcagttaaatgcagtggttgacttgcaggacagaaacacagaactttcttaccaactcttgcttgactctctgggcgacagaaccagatactttagcatgtggaatcaggctgtggacagttatgatcctgatgtacgtgttattgaaaatcatggtgtggaagatgaacttcccaactactgttttccactggacggcataggtgttccaacaaccagttacaaatcaatagttccaaatggagacaatgcgcctaattggaaggaacctgaagtaaatggaacaagtgagatcggacagggtaatttgtttgccatggaaattaaccttcaagccaatctatggcgaagtttcctttattccaatgtggctctatatctcccagactcgtacaaatacaccccgtccaatgtcactcttccagaaaacaaaaacacctacgactacatgaacgggcgggtggtgccgccatctctagtagacacctatgtgaacattggtgccaggtggtctctggatgccatggacaatgtcaacccattcaaccaccaccgtaacgctggcttgcgttaccgatccatgcttctgggtaacggacgttatgtgcctttccacatacaagtgcctcaaaaattcttcgctgttaaaaacctgctgcttctcccaggctcctacacttatgagtggaactttaggaaggatgtgaacatggttctacagagttccctcggtaacgacctgcgggtagatggcgccagcatcagtttcacgagcatcaacctctatgctacttttttccccatggctcacaacaccgcttccacccttgaagccatgctgcggaatgacaccaatgatcagtcattcaacgactacctatctgcagctaacatgctctaccccattcctgccaatgcaaccaatattcccatttccattccttctcgcaactgggcggctttcagaggctggtcatttaccagactgaaaaccaaagaaactccctctttggggtctggatttgacccctactttgtctattctggttctattccctacctggatggtaccttctacctgaaccacacttttaagaaggtttccatcatgtttgactcttcagtgagctggcctggaaatgacaggttactatctcctaacgaatttgaaataaagcgcactgtggatggcgaaggctacaacgtagcccaatgcaacatgaccaaagactggttcttggtacagatgctcgccaactacaacatcggctatcagggcttctacattccagaaggatacaaagatcgcatgtattcatttttcagaaacttccagcccatgagcaggcaggtggttgatgaggtcaattacaaagacttcaaggccgtcgccataccctaccaacacaacaactctggctttgtgggttacatggctccgaccatgcgccaaggtcaaccctatcccgctaactatccctatccactcattggaacaactgccgtaaatagtgttacgcagaaaaagttcttgtgtgacagaaccatgtggcgcataccgttctcgagcaacttcatgtctatgggggcccttacagacttgggacagaatatgctctatgccaactcagctcatgctctggacatgacctttgaggtggatcccatggatgagcccaccctgctttatcttctcttcgaagttttcgacgtggtcagagtgcatcagccacaccgcggcatcatcgaggcagtctacctgcgtacaccgttctcggccggtaacgctaccacgtaagaagcttcttgcttcttgcaaatagcagctgcaaccatggcctgcggatcccaaaacggctccagcgagcaagagctcagagccattgtccaagacctgggttgcggaccctattttttgggaacctacgataagcgcttcccggggttcatggcccccgataagctcgcctgtgccattgtaaatacggccggacgtgagacggggggagagcactggttggctttcggttggaacccacgttctaacacctgctacctttttgatccttttggattctcggatgatcgtctcaaacagatttaccagtttgaatatgagggtctcctgcgccgcagcgctcttgctaccaaggaccgctgtattacgctggaaaaatctacccagaccgtgcagggtccccgttctgccgcctgcggacttttctgctgcatgttccttcacgcctttgtgcactggcctgaccgtcccatggacggaaaccccaccatgaaattgctaactggagtgccaaacaacatgcttcattctcctaaagtccagcccaccctgtgtgacaatcaaaaagcactctaccattttcttaatacccattcgccttattttcgctcccatcgtacacacatcgaaagggccactgcgttcgaccgtatggatgttcaataatgactcatgtaaacaacgtgttcaataaacatcactttatttttttacatgtatcaaggctctgcattacttatttatttacaagtcgaatgggttctgacgagaatcagaatgacccgcaggcagtgatacgttgcggaactgatacttgggttgccacttgaattcgggaatcaccaacttgggaaccggtatatcgggcaggatgtcactccacagctttctggtcagctgcaaagctccaagcaggtcaggagccgaaatcttgaaatcacaattaggaccagtgctttgagcgcgagagttgcggtacaccggattgcagcactgaaacaccatcagcgacggatgtctcacgcttgccagcacggtgggatctgcaatcatgcccacatccagatcttcagcattggcaatgctgaacggggtcatcttgcaggtctgcctacccatggcgggcacccaattaggcttgtggttgcaatcgcagtgcagggggatcagtatcatcttggcctgatcctgtctgattcctggatacacggctctcatgaaagcatcatattgcttgaaagcctgctgggctttactaccctcggtataaaacatcccgcaggacctgctcgaaaactggttagctgcacagccggcatcattcacacagcagcgggcgtcattgttagctatttgcaccacacttctgccccagcggttttgggtgattttggttcgctcgggattctcctttaaggctcgttgtccgttctcgctggccacatccatctcgataatctgctccttctgaatcataatattgccatgcaggcacttcagcttgccctcataatcattgcagccatgaggccacaacgcacagcctgtacattcccaattatggtgggcgatctgagaaaaagaatgtatcattccctgcagaaatcttcccatcatcgtgctcagtgtcttgtgactagtgaaagttaactggatgcctcggtgctcctcgtttacgtactggtgacagatgcgcttgtattgttcgtgttgctcaggcattagtttaaaagaggttctaagttcgttatccagcctgtacttctccatcagcagacacatcacttccatgcctttctcccaagcagacaccaggggcaagctaatcggattcttaacagtgcaggcagcagctcctttagccagagggtcatctttagcgatcttctcaatgcttcttttgccatccttctcaacgatgcgcacgggcgggtagctgaaacccactgctacaagttgcgcctcttctctttcttcttcgctgtcttgactgatgtcttgcatggggatatgtttggtcttccttggcttctttttggggggtatcggaggaggaggactgtcgctccgttccggagacagggaggattgtgacgtttcgctcaccattaccaactgactgtcggtagaagaacctgaccccacacggcgacaggtgtttctcttcgggggcagaggtggaggcgattgcgaagggctgcggtccgacctggaaggcggatgactggcagaaccccttccgcgttcgggggtgtgctccctgtggcggtcgcttaactgatttccttcgcggctggccattgtgttctcctaggcagagaaacaacagacatggaaactcagccattgctgtcaacatcgccacgagtgccatcacatctcgtcctcagcgacgaggaaaaggagcagagcttaagcattccaccgcccagtcctgccaccacctctaccctagaagataaggaggtcgacgcatctcatgacatgcagaataaaaaagcgaaagagtctgagacagacatcgagcaagacccgggctatgtgacaccggtggaacacgaggaagagttgaaacgctttctagagagagaggatgaaaactgcccaaaacaacgagcagataactatcaccaagatgctggaaatagggatcagaacaccgactacctcatagggcttgacggggaagacgcgctccttaaacatctagcaagacagtcgctcatagtcaaggatgcattattggacagaactgaagtgcccatcagtgtggaagagctcagccgcgcctacgagcttaacctcttttcacctcgtactccccccaaacgtcagccaaacggcacctgcgagccaaatcctcgcttaaacttttatccagcttttgctgtgccagaagtactggctacctatcacatcttttttaaaaatcaaaaaattccagtctcctgccgcgctaatcgcacccgcgccgatgccctactcaatctgggacctggttcacgcttacctgatatagcttccttggaagaggttccaaagatcttcgagggtctgggcaataatgagactcgggccgcaaatgctctgcaaaagggagaaaatggcatggatgagcatcacagcgttctggtggaattggaaggcgataatgccagactcgcagtactcaagcgaagcatcgaggtcacacacttcgcatatcccgctgtcaacctgccccctaaagtcatgacggcggtcatggaccagttactcattaagcgcgcaagtcccctttcagaagacatgcatgacccagatgcctgtgatgagggtaaaccagtggtcagtgatgagcagctaacccgatggctgggcaccgactctcccagggatttggaagagcgtcgcaagcttatgatggccgtggtgctggttaccgtagaactagagtgtctccgacgtttctttaccgattcagaaaccttgcgcaaactcgaagagaatctgcactacacttttagacacggctttgtgcggcaggcatgcaagatatctaacgtggaactcaccaacctggtttcctacatgggtattctgcatgagaatcgcctaggacaaagcgtgctgcacagcaccctgaagggggaagcccgccgtgattacatccgcgattgtgtctatctgtacctgtgccacacgtggcaaaccggcatgggtgtatggcagcaatgtttagaagaacagaacttgaaagagcttgacaagctcttacagaaatctcttaaggttctgtggacagggttcgacgagcgcaccgtcgcttccgacctggcagacctcatcttcccagagcgtctcagggttactttgcgaaacggattgcctgactttatgagccagagcatgcttaacaattttcgctctttcatcctggaacgctccggtatcctgcccgccacctgctgcgcactgccctccgactttgtgcctctcacctaccgcgagtgccccccgccgctatggagtcactgctacctgttccgtctggccaactatctctcctaccactcggatgtgatcgaggatgtgagcggagacggcttgctggagtgtcactgccgctgcaatctgtgcacgccccaccggtccctagcttgcaacccccagttgatgagcgaaacccagataataggcacctttgaattgcaaggccccagcagccaaggcgatgggtcttctcctgggcaaagtttaaaactgaccccgggactgtggacctccgcctacttgcgcaagtttgctccggaagattaccacccctatgaaatcaagttctatgaggaccaatcacagcctccaaaggccgaactttcggcctgcgtcatcacccagggggcaattctggcccaattgcaagccatccaaaaatcccgccaagaatttctactgaaaaagggtaagggggtctaccttgacccccagaccggcgaggaactcaacacaaggttccctcaggatgtcccaacgacgagaaaacaagaagttgaaggtgcagccgccgcccccagaagatatggaggaagattgggacagtcaggcagaggaggcggaggaggacagtctggaggacagtctggaggaagacagtttggaggaggaaaacgaggaggcagaggaggtggaagaagtaaccgccgacaaacagttatcctcggctgcggagacaagcaacagcgctaccatctccgctccgagtcgaggaacccggcggcgtcccagcagtagatgggacgagaccggacgcttcccgaacccaaccagcgcttccaagaccggtaagaaggatcggcagggatacaagtcctggcgggggcataagaatgccatcatctcctgcttgcatgagtgcgggggcaacatatccttcacgcggcgctacttgctattccaccatggggtgaactttccgcgcaatgttttgcattactaccgtcacctccacagcccctactatagccagcaaatcccggcagtctcgacagataaagacagcggcggcgacctccaacagaaaaccagcagcggcagttagaaaatacacaacaagtgcagcaacaggaggattaaagattacagccaacgagccagcgcaaacccgagagttaagaaatcggatctttccaaccctgtatgccatcttccagcagagtcggggtcaagagcaggaactgaaaataaaaaaccgatctctgcgttcgctcaccagaagttgtttgtatcacaagagcgaagatcaacttcagcgcactctcgaggacgccgaggctctcttcaacaagtactgcgcgctgactcttaaagagtaggcagcgaccgcgcttattcaaaaaaggcgggaattacatcatcctcgacatgagtaaagaaattcccacgccttacatgtggagttatcaaccccaaatgggattggcggcaggcgcctcccaggactactccacccgcatgaattggctcagcgccgggccttctatgatttctcgagttaatgatatacgcgcctaccgaaaccaaatacttttggaacagtcagctcttaccaccacgccccgccaacaccttaatcccagaaattggcccgccgccctagtgtaccaggaaagtcccgctcccaccactgtattacttcctcgagacgcccaggccgaagtccaaatgactaatgcaggtgcgcagttagctggcggctccaccctatgtcgtcacaggcctcggcataatataaaacgcctgatgatcagaggccgaggtatccagctcaacgacgagtcggtgagctctccgcttggtctacgaccagacggaatctttcagattgccggctgcgggagatcttccttcacccctcgtcaggctgttctgactttggaaagttcgtcttcgcaaccccgctcgggcggaatcgggaccgttcaatttgtggaggagtttactccctctgtctacttcaaccccttctccggatctcctgggcattacccggacgagttcataccgaacttcgacgcgattagcgagtcagtggacggctacgattgatgtctggtgacgcggctgagctatctcggctgcgacatctagaccactgccgccgctttcgctgctttgcccgggaactcattgagttcatctacttcgaactccccaaggatcaccctcaaggtccggcccacggagtgcggatttctatcgaaggcaaaatagactctcgcctgcaacgaattttctcccagcggcccgtgctgatcgagcgagaccagggaaacaccacggtttccatctactgcatttgtaatcaccccggattgcatgaaagcctttgctgtcttatgtgtactgagtttaataaaaactgaattaagactctcctacggactgccgcttcttcaacccggattttacaaccagaagaacgaaacttttcctgtcgtccaggactctgttaacttcacctttcctactcacaaactagaagctcaacgactacaccgcttttccagaagcattttccctactaatactactttcaaaaccggaggtgagctccaaggtcttcctacagaaaacccttgggtggaagcgggccttgtagtgctaggaattcttgcgggtgggcttgtgattattctttgctacctatacacaccttgcttcactttcttagtggtgttgtggtattggtttaaaaaatggggcccatactagtcttgcttgttttactttcgcttttggaaccgggttctgccaattacgatccatgtctagacttcgacccagaaaactgcacacttacttttgcacccgacacaagccgcatctgtggagttcatcgcctctcttacgaacttggcccccaacgacaaaaatttacctgcatggtgggaatcaaccccatagttatcacccagcaaagtggagatactaagggttgcattcactgctcctgcgattccatcgagtgcacctacaccctgctgaagaccctatgcggcctaagagacctgctaccaatgaattaaaaaatgattaataaaaaatcacttacttgaaatcagcaataaggtctctgttgaaattttctcccagcagcacctcacttccctcttcccaactctggtattctaaaccccgttcagcggcatactttctccatactttaaaggggatgtcaaattttagctcctctcctgtacccacaatcttcatgtctttcttcccagatgaccaagagagtccggctcagtgactccttcaaccctgtctacccctatgaagatgaaagcacctcccaacacccctttataaacccagggtttatttccccaaatggcttcacacaaagcccaaacggagttcttactttaaaatgtttaaccccactaacaaccacaggcggatctctacagctaaaagtgggagggggacttacagtggatgacaccaacggttttttgaaagaaaacataagtgccaccacaccactcgttaagactggtcactctataggtttaccactaggagccggattgggaacgaatgaaaataaactttgtatcaaattaggacaaggacttacattcaattcaaacaacatttgcattgatgacaatattaacaccttatggacaggagtcaaccccaccgaagccaactgtcaaatcatgaactccagtgaatctaatgattgcaaattaattctaacactagttaaaactggagcactagtcactgcatttgtttatgttataggagtatctaacaattttaatatgctaactacacacagaaatataaattttactgcagagctgtttttcgattctactggtaatttactaactagactctcatccctcaaaactccacttaatcataaatcaggacaaaacatggctactggtgccattactaatgctaaaggtttcatgcccagcacgactgcctatcctttcaatgataattctagagaaaaagaaaactacatttacggaacttgttactacacagctagtgatcgcactgcttttcccattgacatatctgtcatgcttaaccgaagagcaataaatgacgagacatcatattgtattcgtataacttggtcctggaacacaggagatgccccagaggtgcaaacctctgctacaaccctagtcacctccccatttaccttttactacatcagagaagacgactgacaaataaagtttgcgatcgcggctcccgccagatctagtaatcaattacggggtcattagttcatagcccatatatggagttccgcgttacataacttacggtaaatggcccgcctggctgaccgcccaacgacccccgcccattgacgtcaataatgacgtatgttcccatagtaacgccaatagggactttccattgacgtcaatgggtggagtatttacggtaaactgcccacttggcagtacatcaagtgtatcatatgccaagtacgccccctattgacgtcaatgacggtaaatggcccgcctggcattatgcccagtacatgaccttatgggactttcctacttggcagtacatctacgtattagtcatcgctattaccatgctgatgcggttttggcagtacatcaatgggcgtggatagcggtttgactcacggggatttccaagtctccaccccattgacgtcaatgggagtttgttttggcaccaaaatcaacgggactttccaaaatgtcgtaacaactccgccccattgacgcaaatgggcggtaggcgtgtacggtgggaggtctatataagcagagctggtttagtgaaccgtcagatcagatctttgtcgatcctaccatccactcgacacacccgccagcggccgctgccaagcttccgagctctcgaattcaaaggaggtacccaccatgggatggagctgtatcatcctcttcttggtagcaacagctacaggtgtccactccgaggttcagctggtggagtctggcggtggcctggtgcagccagggggctcactccgtttgtcctgtgcagcttctggctataccttcaccaactatggtatgaactgggtccgtcaggccccgggtaagggcctggaatgggttggatggattaacacctataccggtgaaccgacctatgctgcggatttcaaacgtcgttttactttttctctggacacctccaagagcacagcttacctgcagatgaacagcctgcgcgctgaggacactgccgtctattactgtgcaaagtacccgcactattatgggagcagccactggtatttcgacgtctggggtcaaggaaccctggtcaccgtctcctcgggtggcggtggctcgggcggtggtggatctggtggcggcggatctgatatccagatgacccagtccccgagctccctgtccgcctctgtgggcgatagggtcaccatcacctgcagcgcaagtcaggatattagcaactatttaaactggtatcaacagaaaccaggaaaagctccgaaagtcctgatttacttcacctcctctctccactctggagtcccttctcgcttctctggatccggttctgggacggatttcactctgaccatcagcagtctgcagccagaagacttcgcaacttattactgtcaacagtatagcaccgtgccgtggacgtttggacagggtaccaaggtggagatcaaacgacatcatcaccaccaccattaagctagcttgactgactgagatacagcgtaccttcagctcacagacatgataagatacattgatgagtttggacaaaccacaactagaatgcagtgaaaaaaatgctttatttgtgaaatttgtgatgctattgctttatttgtaaccattataagctgcaataaacaagttaacaacaacaattgcattcattttatgtttcaggttcagggggaggtgtgggaggttttttaaagcaagtaaaacctctacaaatgtggtagtcgtcagctatcctgcaggaacttgtttatttgaaaatcaattcacaaaatccgagtagttattttgcctcccccttcccatttaacagaatacaccaatctctccccacgcacagctttaaacatttggataccattagatatagacatggttttagattccacattccaaacagtttcagagcgagccaatctggggtcagtgatagataaaaatccatcgggatagtcttttaaagcgctttcacagtccaactgctgcggatgcgactccggagtctggatcacggtcatctggaagaagaacgatgggaatcataatccgaaaacggtatcggacgattgtgtctcatcaaacccacaagcagccgctgtctgcgtcgctccgtgcgactgctgtttatgggatcagggtccacagtgtcctgaagcatgattttaatagcccttaacatcaactttctggtgcgatgcgcgcagcaacgcattctgatttcactcaaatctttgcagtaggtacaacacattattacaatattgtttaataaaccataattaaaagcgctccagccaaaactcatatctgatataatcgcccctgcatgaccatcataccaaagtttaatataaattaaatgacgttccctcaaaaacacactacccacatacatgatctcttttggcatgtgcatattaacaatctgtctgtaccatggacaacgttggttaatcatgcaacccaatataaccttccggaaccacactgccaacaccgctcccccagccatgcattgaagtgaaccctgctgattacaatgacaatgaagaacccaattctctcgaccgtgaatcacttgagaatgaaaaatatctatagtggcacaacatagacataaatgcatgcatcttctcataatttttaactcctcaggatttagaaacatatcccagggaataggaagctcttgcagaacagtaaagctggcagaacaaggaagaccacgaacacaacttacactatgcatagtcatagtatcacaatctggcaacagcgggtggtcttcagtcatagaagctcgggtttcattttcctcacaacgtggtaactgggctctggtgtaagggtgatgtctggcgcatgatgtcgagcgtgcgcgcaaccttgtcataatggagttgcttcctgacattctcgtattttgtatagcaaaacgcggccctggcagaacacactcttcttcgccttctatcctgccgcttagcgtgttccgtgtgatagttcaagtacaaccacactcttaagttggtcaaaagaatgctggcttcagttgtaatcaaaactccatcgcatctaatcgttctgaggaaatcatccaagcaatgcaactggattgtgtttcaagcaggagaggagagggaagagacggaagaaccatgttaatttttattccaaacgatctcgcagtacttcaaattgtagatcgcgcagatggcatctctcgcccccactgtgttggtgaaaaagcacagctagatcaaaagaaatgcgattttcaaggtgctcaacggtggcttccagcaaagcctccacgcgcacatccaagaacaaaagaataccaaaagaaggagcattttctaactcctcaatcatcatattacattcctgcaccattcccagataattttcagctttccagccttgaattattcgtgtcagttcttgtggtaaatccaatccacacattacaaacaggtcccggagggcgccctccaccaccattcttaaacacaccctcataatgacaaaatatcttgctcctgtgtcacctgtagcgaattgagaatggcaacatcaattgacatgcccttggctctaagttcttctttaagttctagttgtaaaaactctctcatattatcaccaaactgcttagccagaagccccccgggaacaagagcaggggacgctacagtgcagtacaagcgcagacctccccaattggctccagcaaaaacaagattggaataagcatattgggaaccgccagtaatatcatcgaagttgctggaaatataatcaggcagagtttcttgtaaaaattgaataaaagaaaaatttgccaaaaaaacattcaaaacctctgggatgcaaatgcaataggttaccgcgctgcgctccaacattgttagttttgaattagtctgcaaaaataaaaaaaaaaacaagcgtcatatcatagtagcctgacgaacagatggataaatcagtctttccatcacaagacaagccacagggtctccagctcgaccctcgtaaaacctgtcatcatgattaaacaacagcaccgaaagttcctcgcggtgaccagcatgaataattcttgatgaagcatacaatccagacatgttagcatcagttaacgagaaaaaacagccaacatagcctttgggtataattatgcttaatcgtaagtatagcaaagccacccctcgcggatacaaagtaaaaggcacaggagaataaaaaatataattatttctctgctgctgttcaggcaacgtcgcccccggtccctctaaatacacatacaaagcctcatcagccatggcttaccagacaaagtacagcgggcacacaaagcacaagctctaaagtgactctccaacctctccacaatatatatatacacaagccctaaactgacgtaatgggagtaaagtgtaaaaaatcccgccaaacccaacacacaccccgaaactgcgtcaccagggaaaagtacagtttcacttccgcaatcccaacaggcgtaacttcctctttctcacggtacgtgatatcccactaacttgcaacgtcattttcccacggtcgcaccgccccttttagccgttaaccccacagccaatcaccacacgatccacactttttaaaatcacctcatttacatattggcaccattccatctataaggtatattatatagataga

SEQ ID NO: 8 - DNA, 34099 bp, Artificial Sequence
  NG-73 virus genome sequence
tctatctatataatataccttatagatggaatggtgccaatatgtaaatgaggtgattttaaaaagtgtggatcgtgtggtgattggctgtggggttaacggctaaaaggggcggtgcgaccgtgggaaaatgacgttttgtgggggtggagtttttttgcaagttgtcgcgggaaatgtgacgcataaaaaggcttttttctcacggaactacttagttttcccacggtatttaacaggaaatgaggtagttttgaccggatgcaagtgaaaattgttgattttcgcgcgaaaactgaatgaggaagtgtttttctgaataatgtggtatttatggcagggtggagtatttgttcagggccaggtagactttgacccattacgtggaggtttcgattaccgtgttttttacctgaatttccgcgtaccgtgtcaaagtcttctgtttttacgtaggtgtcagctgatcgctagggtatttatacctcagggtttgtgtcaagaggccactcttgagtgccagcgagaagagttttctcctctgcgccggcagtttaataataaaaaaatgagagatttgcgatttctgcctcaggaaataatctctgctgagactggaaatgaaatattggagcttgtggtgcacgccctgatgggagacgatccggagccacctgtgcagctttttgagcctcctacgcttcaggaactgtatgatttagaggtagagggatcggaggattctaatgaggaagctgtaaatggcttttttaccgattctatgcttttagctgctaatgaagggttagaattagatccgcctttggacacttttgatactccaggggtaattgtggaaagcggtacaggtgtaagaaaattacctgatttgagttccgtggactgtgatttgcactgctatgaagacgggtttcctccgagtgatgaggaggaccatgaaaaggagcagtccatgcagactgcagcgggtgagggagtgaaggctgccaatgttggttttcagttggattgcccggagcttcctggacatggctgtaagtcttgtgaatttcacaggaaaaatactggagtaaaggaactgttatgttcgctttgttatatgagaacgcactgccactttatttacagtaagtgtgtttaagttaaaatttaaaggaatatgctgtttttcacatgtatattgagtgtgagttttgtgcttcttattataggtcctgtgtctgatgctgatgaatcaccatctcctgattctactacctcacctcctgagattcaagcacctgttcctgtggacgtgcgcaagcccattcctgtgaagcttaagcctgggaaacgtccagcagtggaaaaacttgaggacttgttacagggtggggacggacctttggacttgagtacacggaaacgtccaagacaataagtgttccatatccgtgtttacttaaggtgacgtcaatatttgtgtgacagtgcaatgtaataaaaatatgttaactgttcactggtttttattgctttttgggcggggactcaggtatataagtagaagcagacctgtgtggttagctcataggagctggctttcatccatggaggtttgggccattttggaagaccttaggaagactaggcaactgttagagaacgcttcggacggagtctccggtttttggagattctggttcgctagtgaattagctagggtagtttttaggataaaacaggactataaacaagaatttgaaaagttgttggtagattgcccaggactttttgaagctcttaatttgggccatcaggttcactttaaagaaaaagttttatcagttttagacttttcaaccccaggtagaactgctgctgctgtggcttttcttacttttatattagataaatggatcccgcagactcatttcagcaggggatacgttttggatttcatagccacagcattgtggagaacatggaaggttcgcaagatgaggacaatcttaggttactggccagtgcagcctttgggtgtagcgggaatcctgaggcatccaccggtcatgccagcggttctggaggaggaacagcaagaggacaacccgagagccggcctggaccctccagtggaggaggcggagtagctgacttgtctcctgaactgcaacgggtgcttactggatctacgtccactggacgggataggggcgttaagagggagagggcatctagtggtactgatgctagatctgagttggctttaagtttaatgagtcgcagacgtcctgaaaccatttggtggcatgaggttcagaaagagggaagggatgaagtttctgtattgcaggagaaatattcactggaacaggtgaaaacatgttggttggagcctgaggatgattgggaggtggccattaaaaattatgccaagatagctttgaggcctgataaacagtataagattactagacggattaatatccggaatgcttgttacatatctggaaatggggctgaggtggtaatagatactcaagacaaggcagttattagatgctgcatgatggatatgtggcctggggtagtcggtatggaagcagtaacttttgtaaatgttaagtttaggggagatggttataatggaatagtgtttatggccaataccaaacttatattgcatggttgtagcttttttggtttcaacaatacctgtgtagatgcctggggacaggttagtgtacggggatgtagtttctatgcgtgttggattgccacagctggcagaaccaagagtcaattgtctctgaagaaatgcatatttcaaagatgtaacctgggcattctgaatgaaggcgaagcaagggtccgccactgcgcttctacagatactggatgttttattttgattaagggaaatgccagcgtaaagcataacatgatttgcggtgcttccgatgagaggccttatcaaatgctcacttgtgctggtgggcattgtaatatgctggctactgtgcatattgtttcccatcaacgcaaaaaatggcctgtttttgatcacaatgtgatgacgaagtgtaccatgcatgcaggtgggcgtagaggaatgtttatgccttaccagtgtaacatgaatcatgtgaaagtgttgttggaaccagatgccttttccagaatgagcctaacaggaatttttgacatgaacatgcaaatctggaagatcctgaggtatgatgatacgagatcgagggtacgcgcatgcgaatgcggaggcaagcatgccaggttccagccggtgtgtgtagatgtgactgaagatctcagaccggatcatttggttattgcccgcactggagcagagttcggatccagtggagaagaaactgactaaggtgagtattgggaaaactttggggtgggattttcagatggacagattgagtaaaaatttgttttttctgtcttgcagctgtcatgagtggaaacgcttcttttaaggggggagtcttcagcccttatctgacagggcgtctcccatcctgggcaggagttcgtcagaatgttatgggatctactgtggatggaagacccgtccaacccgccaattcttcaacgctgacctatgctactttaagttcttcacctttggacgcagctgcagctgccgccgccgcttctgttgccgctaacactgtgcttggaatgggttactatggaagcatcatggctaattccacttcctctaataacccttctaccctgactcaggacaagttacttgtccttttggcccagctggaggctttgacccaacgtctgggtgaactttctcagcaggtggtcgagttgcgagtacaaactgagtctgctgtcggcacggcaaagtctaaataaaaaaatcccagaatcaatgaataaataaacaagcttgttgttgatttaaaatcaagtgtttttatttcatttttcgcgcacggtatgccctagaccaccgatctctatcattgagaactcggtggattttttccaggatcctatagaggtgggattgaatgtttagatacatgggcattaggccgtctttggggtggagatagctccattgaagggattcatgctccggggtagtgttgtaaatcacccagtcataacaaggtcgcagtgcatggtgttgcacaatatcttttagaagtaggctgattgccacagataagcccttggtgtaggtgtttacaaaccggttgagctgggatgggtgcattcggggtgaaattatgtgcattttggattggatttttaagttggcaatattgccgccaagatcccgtcttgggttcatgttatgaaggaccaccaagacggtgtatccggtacatttaggaaatttatcgtgcagcttggatggaaaagcgtggaaaaatttggagacacccttgtgtcctccaagattttccatgcactcatccatgataatagcaatggggccgtgggcagcggcgcgggcaaacacgttccgtgggtctgacacatcatagttatgttcctgagttaaatcatcataagccattttaatgaatttggggcggagagtaccagattggggtatgaatgttccttcgggccccggagcatagttcccctcacagatttgcatttcccaagctttcagttccgagggtggaatcatgtccacctggggggctatgaaaaacaccgtttctggggcgggggtgattaattgtgatgatagcaaatttctgagcaattgagatttgccacatccggtggggccataaatgattccgattacgggttgcaggtggtagtttagggaacggcaactgccgtcttctcgaagcaagggggccacctcgttcatcatttcccttacatgcatattttcccgcaccaaatccattaggaggcgctctcctcctagtgatagaagttcttgtagtgaggaaaagtttttcagcggtttcagaccgtcagccatgggcattttggagagagtttgctgcaaaagttctagtctgttccacagttcagtgatgtgttctatggcatctcgatccagcagacctcctcgtttcgcgggtttggacggctcctggaatagggtatgagacgatgggcgtccagcgctgccagggttcggtccttccagggtctcagtgttcgagtcagggttgtttccgtcacagtgaaggggtgtgcgcctgcttgggcgcttgccagggtgcgcttcagactcatcctgctggtcgaaaacttctgtcgcttggcgccctgtatgtcggccaagtagcagtttaccatgagttcgtagttgagcgcctcggctgcgtggcctttggcgcggagcttacctttggaagttttcttgcataccgggcagtataggcatttcagcgcatacaacttgggcgcaaggaaaacggattctggggagtatgcatctgcgccgcaggaggcgcaaacagtttcacattccaccagccaggttaaatccggttcattggggtcaaaaacaagttttccgccatattttttgatgcgtttcttacctttggtctccatgagttcgtgtcctcgttgagtgacaaacaggctgtccgtgtccccgtagactgattttacaggcctcttctccagtggagtgcctcggtcttcttcgtacaggaactctgaccactctgatacaaaggcgcgcgtccaggccagcacaaaggaggctatgtgggaggggtagcgatcgttgtcaaccagggggtccaccttttccaaagtatgcaaacacatgtcaccctcttcaacatccaggaatgtgattggcttgtaggtgtatttcacgtgacctggggtccccgctgggggggtataaaagggggcggttctttgctcttcctcactgtcttccggatcgctgtccaggaacgtcagctgttggggtaggtattccctctcgaaggcgggcatgacctctgcactcaggttgtcagtttctaagaacgaggaggatttgatattgacagtgccggttgagatgcctttcatgaggttttcgtccatctggtcagaaaacacaatttttttattgtcaagtttggtggcaaatgatccatacagggcgttggataaaagtttggcaatggatcgcatggtttggttcttttccttgtccgcgcgctctttggcggcgatgttgagttggacatactcgcgtgccaggcacttccattcggggaagatagttgttaattcatctggcacgattctcacttgccaccctcgattatgcaaggtaattaaatccacactggtggccacctcgcctcgaaggggttcattggtccaacagagcctacctcctttcctagaacagaaagggggaagtgggtctagcataagttcatcgggagggtctgcatccatggtaaagattcccggaagtaaatccttatcaaaatagctgatgggagtggggtcatctaaggccatttgccattctcgagctgccagtgcgcgctcatatgggttaaggggactgccccatggcatgggatgggtgagtgcagaggcatacatgccacagatgtcatagacgtagatgggatcctcaaagatgcctatgtaggttggatagcatcgcccccctctgatacttgctcgcacatagtcatatagttcatgtgatggcgctagcagccccggacccaagttggtgcgattgggtttttctgttctgtagacgatctggcgaaagatggcgtgagaattggaagagatggtgggtctttgaaaaatgttgaaatgggcatgaggtagacctacagagtctctgacaaagtgggcataagattcttgaagcttggttaccagttcggcggtgacaagtacgtctagggcgcagtagtcaagtgtttcttgaatgatgtcataacctggttggtttttcttttcccacagttcgcggttgagaaggtattcttcgcgatccttccagtactcttctagcggaaacccgtctttgtctgcacggtaagatcctagcatgtagaactgattaactgccttgtaagggcagcagcccttctctacgggtagagagtatgcttgagcagcttttcgtagcgaagcgtgagtaagggcaaaggtgtctctgaccatgactttgaggaattggtatttgaagtcgatgtcgtcacaggctccctgttcccagagttggaagtctacccgtttcttgtaggcggggttgggcaaagcgaaagtaacatcattgaagagaatcttgccggccctgggcatgaaattgcgagtgatgcgaaaaggctgtggtacttccgctcggttattgataacctgggcagctaggacgatctcgtcgaaaccgttgatgttgtgtcctacgatgtataattctatgaaacgcggcgtgcctctgacgtgaggtagcttactgagctcatcaaaggttaggtctgtggggtcagataaggcgtagtgttcgagagcccattcgtgcaggtgaggattcgctttaaggaaggaggaccagaggtccactgccagtgctgtttgtaactggtcccggtactgacgaaaatgccgtccgactgccattttttctggggtgacgcaatagaaggtttgggggtcctgccgccagcgatcccacttgagttttatggcgaggtcataggcgatgttgacgagccgctggtctccagagagtttcatgaccagcatgaaggggattagctgcttgccaaaggaccccatccaggtgtaggtttccacatcgtaggtgagaaagagcctttctgtgcgaggatgagagccaatcgggaagaactggatctcctgccaccagttggaggaatggctgttgatgtgatggaagtagaactccctgcgacgcgccgagcattcatgcttgtgcttgtacagacggccgcagtagtcgcagcgttgcacgggttgtatctcgtgaatgagttgtacctggcttcccttgacgagaaatttcagtgggaagccgaggcctggcgattgtatctcgtgctttactatgttgtctgcatcggcctgttcatcttctgtctcgatggtggtcatgctgacgagccctcgcgggaggcaagtccagacctcggcgcggcaggggcggagctcgaggacgagagcgcgcaggctggagctgtccagggtcctgagacgctgcggactcaggttagtaggcagtgtcaggagattaacttgcatgatcttttggagggcgtgcgggaggttcagatagtacttgatctcaacgggtccgttggtggagatgtcgatggcttgcagggttccgtgtcccttgggcgctaccaccgtgcccttgtttttcattttggacggcggtggctctgttgcttcttgcatgtttagaagcggtgtcgagggcgcgcaccgggcggcaggggcggctcgggacccggcggcatggctggcagtggtacgtcggcgccgcgcgcgggtaggttctggtactgcgccctgagaagactcgcatgcgcgacgacgcggcggttgacatcctggatctgacgcctctgggtgaaagctaccggccccgtgagcttgaacctgaaagagagttcaacagaatcaatctcggtatcgttgacggcggcttgcctaaggatttcttgcacgtcaccagagttgtcctggtaggcgatctccgccatgaactgctcgatctcttcctcttgaagatctccgcggcccgctctctcgacggtggccgcgaggtcgttggagatgcgcccaatgagttgagagaatgcattcatgcccgcctcgttccagacgcggctgtagaccacggcccccacgggatctctcgcgcgcatgaccacctgggcgaggttgagctccacgtggcgggtgaagaccgcatagttgcataggcgctggaaaaggtagttgagtgtggtggcgatgtgctcggtgacgaagaaatacatgatccatcgtctcagcggcatctcgctgacatcgcccagagcttccaagcgctccatggcctcgtagaagtccacggcaaaattaaaaaactgggagtttcgcgcggacacggtcaactcctcttccagaagacggataagttcggcgatggtggtgcgcacctcgcgctcgaaagcccctgggatttcttcctcaatctcttcttcttccactaacatctcttcctcttcaggtggggctgcaggaggagggggaacgcggcgacgccggcggcgcacgggcagacggtcgatgaatctttcaatgacctctccgcggcggcggcgcatggtttcagtgacggcgcggccgttctcgcgcggtcgcagagtaaaaacaccgccgcgcatctccttaaagtggtgactgggaggttctccgtttgggagggagagggcgctgattatacattttattaattggcccgtagggactgcacgcagagatctgatcgtgtcaagatccacgggatctgaaaacctttcgacgaaagcgtctaaccagtcacagtcacaaggtaggctgagtacggcttcttgtgggcgggggtggttatgtgttcggtctgggtcttctgtttcttcttcatctcgggaaggtgagacgatgctgctggtgatgaaattaaagtaggcagttctaagacggcggatggtggcgaggagcaccaggtctttgggtccggcttgctggatacgcaggcgattggccattccccaagcattatcctgacatctagcaagatctttgtagtagtcttgcatgagccgttctacgggcacttcttcctcacccgttctgccatgcatacgtgtgagtccaaatccgcgcattggttgtaccagtgccaagtcagctacgactctttcggcgaggatggcttgctgtacttgggtaagggtggcttgaaagtcatcaaaatccacaaagcggtggtaagctcctgtattaatggtgtaagcacagttggccatgactgaccagttaactgtctggtgaccagggcgcacgagctcggtgtatttaaggcgcgaataggcgcgggtgtcaaagatgtaatcgttgcaggtgcgcaccagatactggtaccctataagaaaatgcggcggtggttggcggtagagaggccatcgttctgtagctggagcgccaggggcgaggtcttccaacataaggcggtgatagccgtagatgtacctggacatccaggtgattcctgcggcggtagtagaagcccgaggaaactcgcgtacgcggttccaaatgttgcgtagcggcatgaagtagttcattgtaggcacggtttgaccagtgaggcgcgcgcagtcattgatgctctatagacacggagaaaatgaaagcgttcagcgactcgactccgtagcctggaggaacgtgaacgggttgggtcgcggtgtaccccggttcgagacttgtactcgagccggccggagccgcggctaacgtggtattggcactcccgtctcgacccagcctacaaaaatccaggatacggaatcgagtcgttttgctggtttccgaatggcagggaagtgagtcctattttttttttttgccgctcagatgcatcccgtgctgcgacagatgcgcccccaacaacagcccccctcgcagcagcagcagcagcaatcacaaaaggctgtccctgcaactactgcaactgccgccgtgagcggtgcgggacagcccgcctatgatctggacttggaagagggcgaaggactggcacgtctaggtgcgccttcacccgagcggcatccgcgagttcaactgaaaaaagattctcgcgaggcgtatgtgccccaacagaacctatttagagacagaagcggcgaggagccggaggagatgcgagcttcccgctttaacgcgggtcgtgagctgcgtcacggtttggaccgaagacgagtgttgcgggacgaggatttcgaagttgatgaaatgacagggatcagtcctgccagggcacacgtggctgcagccaaccttgtatcggcttacgagcagacagtaaaggaagagcgtaacttccaaaagtcttttaataatcatgtgcgaaccctgattgcccgcgaagaagttacccttggtttgatgcatttgtgggatttgatggaagctatcattcagaaccctactagcaaacctctgaccgcccagctgtttctggtggtgcaacacagcagagacaatgaggctttcagagaggcgctgctgaacatcaccgaacccgaggggagatggttgtatgatcttatcaacattctacagagtatcatagtgcaggagcggagcctgggcctggccgagaaggtggctgccatcaattactcggttttgagcttgggaaaatattacgctcgcaaaatctacaagactccatacgttcccatagacaaggaggtgaagatagatgggttctacatgcgcatgacgctcaaggtcttgaccctgagcgatgatcttggggtgtatcgcaatgacagaatgcatcgcgcggttagcgccagcaggaggcgcgagttaagcgacagggaactgatgcacagtttgcaaagagctctgactggagctggaaccgagggtgagaattacttcgacatgggagctgacttgcagtggcagcctagtcgcagggctctgagcgccgcgacggcaggatgtgagcttccttacatagaagaggcggatgaaggcgaggaggaagagggcgagtacttggaagactgatggcacaacccgtgttttttgctagatggaacagcaagcaccggatcccgcaatgcgggcggcgctgcagagccagccgtccggcattaactcctcggacgattggacccaggccatgcaacgtatcatggcgttgacgactcgcaaccccgaagcctttagacagcaaccccaggccaaccgtctatcggccatcatggaagctgtagtgccttcccgctctaatcccactcatgagaaggtcctggccatcgtgaacgcgttggtggagaacaaagctattcgtccagatgaggccggactggtatacaacgctctcttagaacgcgtggctcgctacaacagtagcaatgtgcaaaccaatttggaccgtatgataacagatgtacgcgaagccgtgtctcagcgcgaaaggttccagcgtgatgccaacctgggttcgctggtggcgttaaatgctttcttgagtactcagcctgctaatgtgccgcgtggtcaacaggattatactaactttttaagtgctttgagactgatggtatcagaagtacctcagagcgaagtgtatcagtccggtcctgattacttctttcagactagcagacagggcttgcagacggtaaatctgagccaagcttttaaaaaccttaaaggtttgtggggagtgcatgccccggtaggagaaagagcaaccgtgtctagcttgttaactccgaactcccgcctattattactgttggtagctcctttcaccgacagcggtagcatcgaccgtaattcctatttgggttacctactaaacctgtatcgcgaagccatagggcaaagtcaggtggacgagcagacctatcaagaaattacccaagtcagtcgcgctttgggacaggaagacactggcagtttggaagccactctgaacttcttgcttaccaatcggtctcaaaagatccctcctcaatatgctcttactgcggaggaggagaggatccttagatatgtgcagcagagcgtgggattgtttctgatgcaagagggggcaactccgactgcagcactggacatgacagcgcgaaatatggagcccagcatgtatgccagtaaccgacctttcattaacaaactgctggactacttgcacagagctgccgctatgaactctgattatttcaccaatgccatcttaaacccgcactggctgcccccacctggtttctacacgggcgaatatgacatgcccgaccctaatgacggatttctgtgggacgacgtggacagcgatgttttttcacctctttctgatcatcgcacgtggaaaaaggaaggcggcgatagaatgcattcttctgcatcgctgtccggggtcatgggtgctaccgcggctgagcccgagtctgcaagtccttttcctagtctacccttttctctacacagtgtacgtagcagcgaagtgggtagaataagtcgcccgagtttaatgggcgaagaggagtatctaaacgattccttgctcagaccggcaagagaaaaaaatttcccaaacaatggaatagaaagtttggtggataaaatgagtagatggaagacttatgctcaggatcacagagacgagcctgggatcatggggattacaagtagagcgagccgtagacgccagcgccatgacagacagaggggtcttgtgtgggacgatgaggattcggccgatgatagcagcgtgctggacttgggtgggagaggaaggggcaacccgtttgctcatttgcgccctcgcttgggtggtatgttgtaaaaaaaaataaaaaaaaaactcaccaaggccatggcgacgagcgtacgttcgttcttctttattatctgtgtctagtataatgaggcgagtcgtgctaggcggagcggtggtgtatccggagggtcctcctccttcgtacgagagcgtgatgcagcagcagcaggcgacggcggtgatgcaatccccactggaggctccctttgtgcctccgcgatacctggcacctacggagggcagaaacagcattcgttattcggaactggcacctcagtacgataccaccaggttgtatctggtggacaacaagtcggcggacattgcttctctgaactatcagaatgaccacagcaacttcttgaccacggtggtgcaaaacaatgactttacccctacggaagccagcacccagaccattaactttgatgaacgatcgcggtggggcggtcagctaaagaccatcatgcatactaacatgccaaacgtgaacgagtatatgtttagtaacaagttcaaagcgcgtgtgatggtgtccagaaaacctcccgacggtgctgcagttggggatacttatgatcacaagcaggatattttgaaatatgagtggttcgagtttactttgccagaaggcaacttttcagttactatgactattgatttgatgaacaatgccatcatagataattacttgaaagtgggtagacagaatggagtgcttgaaagtgacattggtgttaagttcgacaccaggaacttcaagctgggatgggatcccgaaaccaagttgatcatgcctggagtgtatacgtatgaagccttccatcctgacattgtcttactgcctggctgcggagtggattttaccgagagtcgtttgagcaaccttcttggtatcagaaaaaaacagccatttcaagagggttttaagattttgtatgaagatttagaaggtggtaatattccggccctcttggatgtagatgcctatgagaacagtaagaaagaacaaaaagccaaaatagaagctgctacagctgctgcagaagctaaggcaaacatagttgccagcgactctacaagggttgctaacgctggagaggtcagaggagacaattttgcgccaacacctgttccgactgcagaatcattattggccgatgtgtctgaaggaacggacgtgaaactcactattcaacctgtagaaaaagatagtaagaatagaagctataatgtgttggaagacaaaatcaacacagcctatcgcagttggtatctttcgtacaattatggcgatcccgaaaaaggagtgcgttcctggacattgctcaccacctcagatgtcacctgcggagcagagcaggtctactggtcgcttccagacatgatgaaggatcctgtcactttccgctccactagacaagtcagtaactaccctgtggtgggtgcagagcttatgcccgtcttctcaaagagcttctacaacgaacaagctgtgtactcccagcagctccgccagtccacctcgcttacgcacgtcttcaaccgctttcctgagaaccagattttaatccgtccgccggcgcccaccattaccaccgtcagtgaaaacgttcctgctctcacagatcacgggaccctgccgttgcgcagcagtatccggggagtccaacgtgtgaccgttactgacgccagacgccgcacctgtccctacgtgtacaaggcactgggcatagtcgcaccgcgcgtcctttcaagccgcactttctaaaaaaaaaaaaaatgtccattcttatctcgcccagtaataacaccggttggggtctgcgcgctccaagcaagatgtacggaggcgcacgcaaacgttctacccaacatcctgtccgtgttcgcggacattttcgcgctccatggggcgccctcaagggccgcactcgcgttcgaaccaccgtcgatgatgtaatcgatcaggtggttgccgacgcccgtaattatactcctactgcgcctacatctactgtggatgcagttattgacagtgtagtggctgacgctcgcaactatgctcgacgtaagagccggcgaaggcgcattgccagacgccaccgagctaccactgccatgcgagccgcaagagctctgctacgaagagctagacgcgtggggcgaagagccatgcttagggcggccagacgtgcagcttcgggcgccagcgccggcaggtcccgcaggcaagcagccgctgtcgcagcggcgactattgccgacatggcccaatcgcgaagaggcaatgtatactgggtgcgtgacgctgccaccggtcaacgtgtacccgtgcgcacccgtccccctcgcacttagaagatactgagcagtctccgatgttgtgtcccagcggcgaggatgtccaagcgcaaatacaaggaagaaatgctgcaggttatcgcacctgaagtctacggccaaccgttgaaggatgaaaaaaaaccccgcaaaatcaagcgggttaaaaaggacaaaaaagaagaggaagatggcgatgatgggctggcggagtttgtgcgcgagtttgccccacggcgacgcgtgcaatggcgtgggcgcaaagttcgacatgtgttgagacctggaacttcggtggtctttacacccggcgagcgttcaagcgctacttttaagcgttcctatgatgaggtgtacggggatgatgatattcttgagcaggcggctgaccgattaggcgagtttgcttatggcaagcgtagtagaataacttccaaggatgagacagtgtcgatacccttggatcatggaaatcccacccctagtcttaaaccggtcactttgcagcaagtgttacccgtaactccgcgaacaggtgttaaacgcgaaggtgaagatttgtatcccactatgcaactgatggtacccaaacgccagaagttggaggacgttttggagaaagtaaaagtggatccagatattcaacctgaggttaaagtgagacccattaagcaggtagcgcctggtctgggggtacaaactgtagacattaagattcccactgaaagtatggaagtgcaaactgaacccgcaaagcctactgccacctccactgaagtgcaaacggatccatggatgcccatgcctattacaactgacgccgccggtcccactcgaagatcccgacgaaagtacggtccagcaagtctgttgatgcccaattatgttgtacacccatctattattcctactcctggttaccgaggcactcgctactatcgcagccgaaacagtacctcccgccgtcgccgcaagacacctgcaaatcgcagtcgtcgccgtagacgcacaagcaaaccgactcccggcgccctggtgcggcaagtgtaccgcaatggtagtgcggaacctttgacactgccgcgtgcgcgttaccatccgagtatcatcacttaatcaatgttgccgctgcctccttgcagatatggccctcacttgtcgccttcgcgttcccatcactggttaccgaggaagaaactcgcgccgtagaagagggatgttgggacgcggaatgcgacgctacaggcgacggcgtgctatccgcaagcaattgcggggtggttttttaccagccttaattccaattatcgctgctgcaattggcgcgataccaggcatagcttccgtggcggttcaggcctcgcaacgacattgacattggaaaaaaacgtataaataaaaaaaaaaaaatacaatggactctgacactcctggtcctgtgactatgttttcttagagatggaagacatcaatttttcatccttggctccgcgacacggcacgaagccgtacatgggcacctggagcgacatcggcacgagccaactgaacgggggcgccttcaattggagcagtatctggagcgggcttaaaaattttggctcaaccataaaaacatacgggaacaaagcttggaacagcagtacaggacaggcgcttagaaataaacttaaagaccagaacttccaacaaaaagtagtcgatgggatagcttccggcatcaatggagtggtagatttggctaaccaggctgtgcagaaaaagataaacagtcgtttggacccgccgccagcaaccccaggtgaaatgcaagtggaggaagaaattcctccgccagaaaaacgaggcgacaagcgtccgcgtcccgatttggaagagacgctggtgacgcgcgtagatgaaccgccttcttatgaggaagcaacgaagcttggaatgcccaccactagaccgatagccccaatggccaccggggtgatgaaaccttctcagttgcatcgacccgtcaccttggatttgccccctccccctgctgctactgctgtacccgcttctaagcctgtcgctgccccgaaaccagtcgccgtagccaggtcacgtcccgggggcgctcctcgtccaaatgcgcactggcaaaatactctgaacagcatcgtgggtctaggcgtgcaaagtgtaaaacgccgtcgctgcttttaattaaatatggagtagcgcttaacttgcctatctgtgtatatgtgtcattacacgccgtcacagcagcagaggaaaaaaggaagaggtcgtgcgtcgacgctgagttactttcaagatggccaccccatcgatgctgccccaatgggcatacatgcacatcgccggacaggatgcttcggagtacctgagtccgggtctggtgcagttcgcccgcgccacagacacctacttcaatctgggaaataagtttagaaatcccaccgtagcgccgacccacgatgtgaccaccgaccgtagccagcggctcatgttgcgcttcgtgcccgttgaccgggaggacaatacatactcttacaaagtgcggtacaccctggccgtgggcgacaacagagtgctggatatggccagcacgttctttgacattaggggtgtgttggacagaggtcccagtttcaaaccctattctggtacggcttacaactccctggctcctaaaggcgctccaaatacatctcagtggattgcagaaggtgtaaaaaatacaactggtgaggaacacgtaacagaagaggaaaccaatactactacttacacttttggcaatgctcctgtaaaagctgaagctgaaattacaaaagaaggactcccagtaggtttggaagtttcagatgaagaaagtaaaccgatttatgctgataaaacatatcagccagaacctcagctgggagatgaaacttggactgaccttgatggaaaaaccgaaaagtatggaggcagggctctcaaacccgatactaagatgaaaccatgctacgggtcctttgccaaacctactaatgtgaaaggcggtcaggcaaaacaaaaaacaacggagcagccaaatcagaaagtcgaatatgatatcgacatggagttttttgatgcggcatcgcagaaaacaaacttaagtcctaaaattgtcatgtatgcagaaaatgtaaatttggaaactccagacactcatgtagtgtacaaacctggaacagaagacacaagttccgaagctaatttgggacaacaatctatgcccaacagacccaactacattggcttcagagataactttattggacttatgtactataacagtactggtaacatgggggtgctggctggtcaagcgtctcagttaaatgcagtggttgacttgcaggacagaaacacagaactttcttaccaactcttgcttgactctctgggcgacagaaccagatactttagcatgtggaatcaggctgtggacagttatgatcctgatgtacgtgttattgaaaatcatggtgtggaagatgaacttcccaactactgttttccactggacggcataggtgttccaacaaccagttacaaatcaatagttccaaatggagacaatgcgcctaattggaaggaacctgaagtaaatggaacaagtgagatcggacagggtaatttgtttgccatggaaattaaccttcaagccaatctatggcgaagtttcctttattccaatgtggctctatatctcccagactcgtacaaatacaccccgtccaatgtcactcttccagaaaacaaaaacacctacgactacatgaacgggcgggtggtgccgccatctctagtagacacctatgtgaacattggtgccaggtggtctctggatgccatggacaatgtcaacccattcaaccaccaccgtaacgctggcttgcgttaccgatccatgcttctgggtaacggacgttatgtgcctttccacatacaagtgcctcaaaaattcttcgctgttaaaaacctgctgcttctcccaggctcctacacttatgagtggaactttaggaaggatgtgaacatggttctacagagttccctcggtaacgacctgcgggtagatggcgccagcatcagtttcacgagcatcaacctctatgctacttttttccccatggctcacaacaccgcttccacccttgaagccatgctgcggaatgacaccaatgatcagtcattcaacgactacctatctgcagctaacatgctctaccccattcctgccaatgcaaccaatattcccatttccattccttctcgcaactgggcggctttcagaggctggtcatttaccagactgaaaaccaaagaaactccctctttggggtctggatttgacccctactttgtctattctggttctattccctacctggatggtaccttctacctgaaccacacttttaagaaggtttccatcatgtttgactcttcagtgagctggcctggaaatgacaggttactatctcctaacgaatttgaaataaagcgcactgtggatggcgaaggctacaacgtagcccaatgcaacatgaccaaagactggttcttggtacagatgctcgccaactacaacatcggctatcagggcttctacattccagaaggatacaaagatcgcatgtattcatttttcagaaacttccagcccatgagcaggcaggtggttgatgaggtcaattacaaagacttcaaggccgtcgccataccctaccaacacaacaactctggctttgtgggttacatggctccgaccatgcgccaaggtcaaccctatcccgctaactatccctatccactcattggaacaactgccgtaaatagtgttacgcagaaaaagttcttgtgtgacagaaccatgtggcgcataccgttctcgagcaacttcatgtctatgggggcccttacagacttgggacagaatatgctctatgccaactcagctcatgctctggacatgacctttgaggtggatcccatggatgagcccaccctgctttatcttctcttcgaagttttcgacgtggtcagagtgcatcagccacaccgcggcatcatcgaggcagtctacctgcgtacaccgttctcggccggtaacgctaccacgtaagaagcttcttgcttcttgcaaatagcagctgcaaccatggcctgcggatcccaaaacggctccagcgagcaagagctcagagccattgtccaagacctgggttgcggaccctattttttgggaacctacgataagcgcttcccggggttcatggcccccgataagctcgcctgtgccattgtaaatacggccggacgtgagacggggggagagcactggttggctttcggttggaacccacgttctaacacctgctacctttttgatccttttggattctcggatgatcgtctcaaacagatttaccagtttgaatatgagggtctcctgcgccgcagcgctcttgctaccaaggaccgctgtattacgctggaaaaatctacccagaccgtgcagggtccccgttctgccgcctgcggacttttctgctgcatgttccttcacgcctttgtgcactggcctgaccgtcccatggacggaaaccccaccatgaaattgctaactggagtgccaaacaacatgcttcattctcctaaagtccagcccaccctgtgtgacaatcaaaaagcactctaccattttcttaatacccattcgccttattttcgctcccatcgtacacacatcgaaagggccactgcgttcgaccgtatggatgttcaataatgactcatgtaaacaacgtgttcaataaacatcactttatttttttacatgtatcaaggctctgcattacttatttatttacaagtcgaatgggttctgacgagaatcagaatgacccgcaggcagtgatacgttgcggaactgatacttgggttgccacttgaattcgggaatcaccaacttgggaaccggtatatcgggcaggatgtcactccacagctttctggtcagctgcaaagctccaagcaggtcaggagccgaaatcttgaaatcacaattaggaccagtgctttgagcgcgagagttgcggtacaccggattgcagcactgaaacaccatcagcgacggatgtctcacgcttgccagcacggtgggatctgcaatcatgcccacatccagatcttcagcattggcaatgctgaacggggtcatcttgcaggtctgcctacccatggcgggcacccaattaggcttgtggttgcaatcgcagtgcagggggatcagtatcatcttggcctgatcctgtctgattcctggatacacggctctcatgaaagcatcatattgcttgaaagcctgctgggctttactaccctcggtataaaacatcccgcaggacctgctcgaaaactggttagctgcacagccggcatcattcacacagcagcgggcgtcattgttagctatttgcaccacacttctgccccagcggttttgggtgattttggttcgctcgggattctcctttaaggctcgttgtccgttctcgctggccacatccatctcgataatctgctccttctgaatcataatattgccatgcaggcacttcagcttgccctcataatcattgcagccatgaggccacaacgcacagcctgtacattcccaattatggtgggcgatctgagaaaaagaatgtatcattccctgcagaaatcttcccatcatcgtgctcagtgtcttgtgactagtgaaagttaactggatgcctcggtgctcctcgtttacgtactggtgacagatgcgcttgtattgttcgtgttgctcaggcattagtttaaaagaggttctaagttcgttatccagcctgtacttctccatcagcagacacatcacttccatgcctttctcccaagcagacaccaggggcaagctaatcggattcttaacagtgcaggcagcagctcctttagccagagggtcatctttagcgatcttctcaatgcttcttttgccatccttctcaacgatgcgcacgggcgggtagctgaaacccactgctacaagttgcgcctcttctctttcttcttcgctgtcttgactgatgtcttgcatggggatatgtttggtcttccttggcttctttttggggggtatcggaggaggaggactgtcgctccgttccggagacagggaggattgtgacgtttcgctcaccattaccaactgactgtcggtagaagaacctgaccccacacggcgacaggtgtttctcttcgggggcagaggtggaggcgattgcgaagggctgcggtccgacctggaaggcggatgactggcagaaccccttccgcgttcgggggtgtgctccctgtggcggtcgcttaactgatttccttcgcggctggccattgtgttctcctaggcagagaaacaacagacatggaaactcagccattgctgtcaacatcgccacgagtgccatcacatctcgtcctcagcgacgaggaaaaggagcagagcttaagcattccaccgcccagtcctgccaccacctctaccctagaagataaggaggtcgacgcatctcatgacatgcagaataaaaaagcgaaagagtctgagacagacatcgagcaagacccgggctatgtgacaccggtggaacacgaggaagagttgaaacgctttctagagagagaggatgaaaactgcccaaaacaacgagcagataactatcaccaagatgctggaaatagggatcagaacaccgactacctcatagggcttgacggggaagacgcgctccttaaacatctagcaagacagtcgctcatagtcaaggatgcattattggacagaactgaagtgcccatcagtgtggaagagctcagccgcgcctacgagcttaacctcttttcacctcgtactccccccaaacgtcagccaaacggcacctgcgagccaaatcctcgcttaaacttttatccagcttttgctgtgccagaagtactggctacctatcacatcttttttaaaaatcaaaaaattccagtctcctgccgcgctaatcgcacccgcgccgatgccctactcaatctgggacctggttcacgcttacctgatatagcttccttggaagaggttccaaagatcttcgagggtctgggcaataatgagactcgggccgcaaatgctctgcaaaagggagaaaatggcatggatgagcatcacagcgttctggtggaattggaaggcgataatgccagactcgcagtactcaagcgaagcatcgaggtcacacacttcgcatatcccgctgtcaacctgccccctaaagtcatgacggcggtcatggaccagttactcattaagcgcgcaagtcccctttcagaagacatgcatgacccagatgcctgtgatgagggtaaaccagtggtcagtgatgagcagctaacccgatggctgggcaccgactctcccagggatttggaagagcgtcgcaagcttatgatggccgtggtgctggttaccgtagaactagagtgtctccgacgtttctttaccgattcagaaaccttgcgcaaactcgaagagaatctgcactacacttttagacacggctttgtgcggcaggcatgcaagatatctaacgtggaactcaccaacctggtttcctacatgggtattctgcatgagaatcgcctaggacaaagcgtgctgcacagcaccctgaagggggaagcccgccgtgattacatccgcgattgtgtctatctgtacctgtgccacacgtggcaaaccggcatgggtgtatggcagcaatgtttagaagaacagaacttgaaagagcttgacaagctcttacagaaatctcttaaggttctgtggacagggttcgacgagcgcaccgtcgcttccgacctggcagacctcatcttcccagagcgtctcagggttactttgcgaaacggattgcctgactttatgagccagagcatgcttaacaattttcgctctttcatcctggaacgctccggtatcctgcccgccacctgctgcgcactgccctccgactttgtgcctctcacctaccgcgagtgccccccgccgctatggagtcactgctacctgttccgtctggccaactatctctcctaccactcggatgtgatcgaggatgtgagcggagacggcttgctggagtgtcactgccgctgcaatctgtgcacgccccaccggtccctagcttgcaacccccagttgatgagcgaaacccagataataggcacctttgaattgcaaggccccagcagccaaggcgatgggtcttctcctgggcaaagtttaaaactgaccccgggactgtggacctccgcctacttgcgcaagtttgctccggaagattaccacccctatgaaatcaagttctatgaggaccaatcacagcctccaaaggccgaactttcggcctgcgtcatcacccagggggcaattctggcccaattgcaagccatccaaaaatcccgccaagaatttctactgaaaaagggtaagggggtctaccttgacccccagaccggcgaggaactcaacacaaggttccctcaggatgtcccaacgacgagaaaacaagaagttgaaggtgcagccgccgcccccagaagatatggaggaagattgggacagtcaggcagaggaggcggaggaggacagtctggaggacagtctggaggaagacagtttggaggaggaaaacgaggaggcagaggaggtggaagaagtaaccgccgacaaacagttatcctcggctgcggagacaagcaacagcgctaccatctccgctccgagtcgaggaacccggcggcgtcccagcagtagatgggacgagaccggacgcttcccgaacccaaccagcgcttccaagaccggtaagaaggatcggcagggatacaagtcctggcgggggcataagaatgccatcatctcctgcttgcatgagtgcgggggcaacatatccttcacgcggcgctacttgctattccaccatggggtgaactttccgcgcaatgttttgcattactaccgtcacctccacagcccctactatagccagcaaatcccggcagtctcgacagataaagacagcggcggcgacctccaacagaaaaccagcagcggcagttagaaaatacacaacaagtgcagcaacaggaggattaaagattacagccaacgagccagcgcaaacccgagagttaagaaatcggatctttccaaccctgtatgccatcttccagcagagtcggggtcaagagcaggaactgaaaataaaaaaccgatctctgcgttcgctcaccagaagttgtttgtatcacaagagcgaagatcaacttcagcgcactctcgaggacgccgaggctctcttcaacaagtactgcgcgctgactcttaaagagtaggcagcgaccgcgcttattcaaaaaaggcgggaattacatcatcctcgacatgagtaaagaaattcccacgccttacatgtggagttatcaaccccaaatgggattggcggcaggcgcctcccaggactactccacccgcatgaattggctcagcgccgggccttctatgatttctcgagttaatgatatacgcgcctaccgaaaccaaatacttttggaacagtcagctcttaccaccacgccccgccaacaccttaatcccagaaattggcccgccgccctagtgtaccaggaaagtcccgctcccaccactgtattacttcctcgagacgcccaggccgaagtccaaatgactaatgcaggtgcgcagttagctggcggctccaccctatgtcgtcacaggcctcggcataatataaaacgcctgatgatcagaggccgaggtatccagctcaacgacgagtcggtgagctctccgcttggtctacgaccagacggaatctttcagattgccggctgcgggagatcttccttcacccctcgtcaggctgttctgactttggaaagttcgtcttcgcaaccccgctcgggcggaatcgggaccgttcaatttgtggaggagtttactccctctgtctacttcaaccccttctccggatctcctgggcattacccggacgagttcataccgaacttcgacgcgattagcgagtcagtggacggctacgattgatgtctggtgacgcggctgagctatctcggctgcgacatctagaccactgccgccgctttcgctgctttgcccgggaactcattgagttcatctacttcgaactccccaaggatcaccctcaaggtccggcccacggagtgcggatttctatcgaaggcaaaatagactctcgcctgcaacgaattttctcccagcggcccgtgctgatcgagcgagaccagggaaacaccacggtttccatctactgcatttgtaatcaccccggattgcatgaaagcctttgctgtcttatgtgtactgagtttaataaaaactgaattaagactctcctacggactgccgcttcttcaacccggattttacaaccagaagaacgaaacttttcctgtcgtccaggactctgttaacttcacctttcctactcacaaactagaagctcaacgactacaccgcttttccagaagcattttccctactaatactactttcaaaaccggaggtgagctccaaggtcttcctacagaaaacccttgggtggaagcgggccttgtagtgctaggaattcttgcgggtgggcttgtgattattctttgctacctatacacaccttgcttcactttcttagtggtgttgtggtattggtttaaaaaatggggcccatactagtcttgcttgttttactttcgcttttggaaccgggttctgccaattacgatccatgtctagacttcgacccagaaaactgcacacttacttttgcacccgacacaagccgcatctgtggagttcatcgcctctcttacgaacttggcccccaacgacaaaaatttacctgcatggtgggaatcaaccccatagttatcacccagcaaagtggagatactaagggttgcattcactgctcctgcgattccatcgagtgcacctacaccctgctgaagaccctatgcggcctaagagacctgctaccaatgaattaaaaaatgattaataaaaaatcacttacttgaaatcagcaataaggtctctgttgaaattttctcccagcagcacctcacttccctcttcccaactctggtattctaaaccccgttcagcggcatactttctccatactttaaaggggatgtcaaattttagctcctctcctgtacccacaatcttcatgtctttcttcccagatgaccaagagagtccggctcagtgactccttcaaccctgtctacccctatgaagatgaaagcacctcccaacacccctttataaacccagggtttatttccccaaatggcttcacacaaagcccaaacggagttcttactttaaaatgtttaaccccactaacaaccacaggcggatctctacagctaaaagtgggagggggacttacagtggatgacaccaacggttttttgaaagaaaacataagtgccaccacaccactcgttaagactggtcactctataggtttaccactaggagccggattgggaacgaatgaaaataaactttgtatcaaattaggacaaggacttacattcaattcaaacaacatttgcattgatgacaatattaacaccttatggacaggagtcaaccccaccgaagccaactgtcaaatcatgaactccagtgaatctaatgattgcaaattaattctaacactagttaaaactggagcactagtcactgcatttgtttatgttataggagtatctaacaattttaatatgctaactacacacagaaatataaattttactgcagagctgtttttcgattctactggtaatttactaactagactctcatccctcaaaactccacttaatcataaatcaggacaaaacatggctactggtgccattactaatgctaaaggtttcatgcccagcacgactgcctatcctttcaatgataattctagagaaaaagaaaactacatttacggaacttgttactacacagctagtgatcgcactgcttttcccattgacatatctgtcatgcttaaccgaagagcaataaatgacgagacatcatattgtattcgtataacttggtcctggaacacaggagatgccccagaggtgcaaacctctgctacaaccctagtcacctccccatttaccttttactacatcagagaagacgactgacaaataaagtttgcgatcgcggctcccgccagatctagtaatcaattacggggtcattagttcatagcccatatatggagttccgcgttacataacttacggtaaatggcccgcctggctgaccgcccaacgacccccgcccattgacgtcaataatgacgtatgttcccatagtaacgccaatagggactttccattgacgtcaatgggtggagtatttacggtaaactgcccacttggcagtacatcaagtgtatcatatgccaagtacgccccctattgacgtcaatgacggtaaatggcccgcctggcattatgcccagtacatgaccttatgggactttcctacttggcagtacatctacgtattagtcatcgctattaccatgctgatgcggttttggcagtacatcaatgggcgtggatagcggtttgactcacggggatttccaagtctccaccccattgacgtcaatgggagtttgttttggcaccaaaatcaacgggactttccaaaatgtcgtaacaactccgccccattgacgcaaatgggcggtaggcgtgtacggtgggaggtctatataagcagagctggtttagtgaaccgtcagatcagatctttgtcgatcctaccatccactcgacacacccgccagcggccgctgccaagcttccgagctctcgaattcaaaggaggtacccaccatgggatggagctgtatcatcctcttcttggtagcaacagctacaggtgtccactccgaggttcagctggtggagtctggcggtggcctggtgcagccagggggctcactccgtttgtcctgtgcagcttctggctataccttcaccaactatggtatgaactgggtccgtcaggccccgggtaagggcctggaatgggttggatggattaacacctataccggtgaaccgacctatgctgcggatttcaaacgtcgttttactttttctctggacacctccaagagcacagcttacctgcagatgaacagcctgcgcgctgaggacactgccgtctattactgtgcaaagtacccgcactattatgggagcagccactggtatttcgacgtctggggtcaaggaaccctggtcaccgtctcctcgggtggcggtggctcgggcggtggtggatctggtggcggcggatctgatatccagatgacccagtccccgagctccctgtccgcctctgtgggcgatagggtcaccatcacctgcagcgcaagtcaggatattagcaactatttaaactggtatcaacagaaaccaggaaaagctccgaaagtcctgatttacttcacctcctctctccactctggagtcccttctcgcttctctggatccggttctgggacggatttcactctgaccatcagcagtctgcagccagaagacttcgcaacttattactgtcaacagtatagcaccgtgccgtggacgtttggacagggtaccaaggtggagatcaaacgataagctagcttgactgactgagatacagcgtaccttcagctcacagacatgataagatacattgatgagtttggacaaaccacaactagaatgcagtgaaaaaaatgctttatttgtgaaatttgtgatgctattgctttatttgtaaccattataagctgcaataaacaagttaacaacaacaattgcattcattttatgtttcaggttcagggggaggtgtgggaggttttttaaagcaagtaaaacctctacaaatgtggtagtcgtcagctatcctgcaggaacttgtttatttgaaaatcaattcacaaaatccgagtagttattttgcctcccccttcccatttaacagaatacaccaatctctccccacgcacagctttaaacatttggataccattagatatagacatggttttagattccacattccaaacagtttcagagcgagccaatctggggtcagtgatagataaaaatccatcgggatagtcttttaaagcgctttcacagtccaactgctgcggatgcgactccggagtctggatcacggtcatctggaagaagaacgatgggaatcataatccgaaaacggtatcggacgattgtgtctcatcaaacccacaagcagccgctgtctgcgtcgctccgtgcgactgctgtttatgggatcagggtccacagtgtcctgaagcatgattttaatagcccttaacatcaactttctggtgcgatgcgcgcagcaacgcattctgatttcactcaaatctttgcagtaggtacaacacattattacaatattgtttaataaaccataattaaaagcgctccagccaaaactcatatctgatataatcgcccctgcatgaccatcataccaaagtttaatataaattaaatgacgttccctcaaaaacacactacccacatacatgatctcttttggcatgtgcatattaacaatctgtctgtaccatggacaacgttggttaatcatgcaacccaatataaccttccggaaccacactgccaacaccgctcccccagccatgcattgaagtgaaccctgctgattacaatgacaatgaagaacccaattctctcgaccgtgaatcacttgagaatgaaaaatatctatagtggcacaacatagacataaatgcatgcatcttctcataatttttaactcctcaggatttagaaacatatcccagggaataggaagctcttgcagaacagtaaagctggcagaacaaggaagaccacgaacacaacttacactatgcatagtcatagtatcacaatctggcaacagcgggtggtcttcagtcatagaagctcgggtttcattttcctcacaacgtggtaactgggctctggtgtaagggtgatgtctggcgcatgatgtcgagcgtgcgcgcaaccttgtcataatggagttgcttcctgacattctcgtattttgtatagcaaaacgcggccctggcagaacacactcttcttcgccttctatcctgccgcttagcgtgttccgtgtgatagttcaagtacaaccacactcttaagttggtcaaaagaatgctggcttcagttgtaatcaaaactccatcgcatctaatcgttctgaggaaatcatccaagcaatgcaactggattgtgtttcaagcaggagaggagagggaagagacggaagaaccatgttaatttttattccaaacgatctcgcagtacttcaaattgtagatcgcgcagatggcatctctcgcccccactgtgttggtgaaaaagcacagctagatcaaaagaaatgcgattttcaaggtgctcaacggtggcttccagcaaagcctccacgcgcacatccaagaacaaaagaataccaaaagaaggagcattttctaactcctcaatcatcatattacattcctgcaccattcccagataattttcagctttccagccttgaattattcgtgtcagttcttgtggtaaatccaatccacacattacaaacaggtcccggagggcgccctccaccaccattcttaaacacaccctcataatgacaaaatatcttgctcctgtgtcacctgtagcgaattgagaatggcaacatcaattgacatgcccttggctctaagttcttctttaagttctagttgtaaaaactctctcatattatcaccaaactgcttagccagaagccccccgggaacaagagcaggggacgctacagtgcagtacaagcgcagacctccccaattggctccagcaaaaacaagattggaataagcatattgggaaccgccagtaatatcatcgaagttgctggaaatataatcaggcagagtttcttgtaaaaattgaataaaagaaaaatttgccaaaaaaacattcaaaacctctgggatgcaaatgcaataggttaccgcgctgcgctccaacattgttagttttgaattagtctgcaaaaataaaaaaaaaaacaagcgtcatatcatagtagcctgacgaacagatggataaatcagtctttccatcacaagacaagccacagggtctccagctcgaccctcgtaaaacctgtcatcatgattaaacaacagcaccgaaagttcctcgcggtgaccagcatgaataattcttgatgaagcatacaatccagacatgttagcatcagttaacgagaaaaaacagccaacatagcctttgggtataattatgcttaatcgtaagtatagcaaagccacccctcgcggatacaaagtaaaaggcacaggagaataaaaaatataattatttctctgctgctgttcaggcaacgtcgcccccggtccctctaaatacacatacaaagcctcatcagccatggcttaccagacaaagtacagcgggcacacaaagcacaagctctaaagtgactctccaacctctccacaatatatatatacacaagccctaaactgacgtaatgggagtaaagtgtaaaaaatcccgccaaacccaacacacaccccgaaactgcgtcaccagggaaaagtacagtttcacttccgcaatcccaacaggcgtaacttcctctttctcacggtacgtgatatcccactaacttgcaacgtcattttcccacggtcgcaccgccccttttagccgttaaccccacagccaatcaccacacgatccacactttttaaaatcacctcatttacatattggcaccattccatctataaggtatattatatagataga

SEQ ID NO: 9 - DNA, 36030 bp, Artificial Sequence
  NG-134 virus genome sequence
tctatctatataatataccttatagatggaatggtgccaatatgtaaatgaggtgattttaaaaagtgtggatcgtgtggtgattggctgtggggttaacggctaaaaggggcggtgcgaccgtgggaaaatgacgttttgtgggggtggagtttttttgcaagttgtcgcgggaaatgtgacgcataaaaaggcttttttctcacggaactacttagttttcccacggtatttaacaggaaatgaggtagttttgaccggatgcaagtgaaaattgttgattttcgcgcgaaaactgaatgaggaagtgtttttctgaataatgtggtatttatggcagggtggagtatttgttcagggccaggtagactttgacccattacgtggaggtttcgattaccgtgttttttacctgaatttccgcgtaccgtgtcaaagtcttctgtttttacgtaggtgtcagctgatcgctagggtatttatacctcagggtttgtgtcaagaggccactcttgagtgccagcgagaagagttttctcctctgcgccggcagtttaataataaaaaaatgagagatttgcgatttctgcctcaggaaataatctctgctgagactggaaatgaaatattggagcttgtggtgcacgccctgatgggagacgatccggagccacctgtgcagctttttgagcctcctacgcttcaggaactgtatgatttagaggtagagggatcggaggattctaatgaggaagctgtaaatggcttttttaccgattctatgcttttagctgctaatgaagggttagaattagatccgcctttggacacttttgatactccaggggtaattgtggaaagcggtacaggtgtaagaaaattacctgatttgagttccgtggactgtgatttgcactgctatgaagacgggtttcctccgagtgatgaggaggaccatgaaaaggagcagtccatgcagactgcagcgggtgagggagtgaaggctgccaatgttggttttcagttggattgcccggagcttcctggacatggctgtaagtcttgtgaatttcacaggaaaaatactggagtaaaggaactgttatgttcgctttgttatatgagaacgcactgccactttatttacagtaagtgtgtttaagttaaaatttaaaggaatatgctgtttttcacatgtatattgagtgtgagttttgtgcttcttattataggtcctgtgtctgatgctgatgaatcaccatctcctgattctactacctcacctcctgagattcaagcacctgttcctgtggacgtgcgcaagcccattcctgtgaagcttaagcctgggaaacgtccagcagtggaaaaacttgaggacttgttacagggtggggacggacctttggacttgagtacacggaaacgtccaagacaataagtgttccatatccgtgtttacttaaggtgacgtcaatatttgtgtgacagtgcaatgtaataaaaatatgttaactgttcactggtttttattgctttttgggcggggactcaggtatataagtagaagcagacctgtgtggttagctcataggagctggctttcatccatggaggtttgggccattttggaagaccttaggaagactaggcaactgttagagaacgcttcggacggagtctccggtttttggagattctggttcgctagtgaattagctagggtagtttttaggataaaacaggactataaacaagaatttgaaaagttgttggtagattgcccaggactttttgaagctcttaatttgggccatcaggttcactttaaagaaaaagttttatcagttttagacttttcaaccccaggtagaactgctgctgctgtggcttttcttacttttatattagataaatggatcccgcagactcatttcagcaggggatacgttttggatttcatagccacagcattgtggagaacatggaaggttcgcaagatgaggacaatcttaggttactggccagtgcagcctttgggtgtagcgggaatcctgaggcatccaccggtcatgccagcggttctggaggaggaacagcaagaggacaacccgagagccggcctggaccctccagtggaggaggcggagtagctgacttgtctcctgaactgcaacgggtgcttactggatctacgtccactggacgggataggggcgttaagagggagagggcatctagtggtactgatgctagatctgagttggctttaagtttaatgagtcgcagacgtcctgaaaccatttggtggcatgaggttcagaaagagggaagggatgaagtttctgtattgcaggagaaatattcactggaacaggtgaaaacatgttggttggagcctgaggatgattgggaggtggccattaaaaattatgccaagatagctttgaggcctgataaacagtataagattactagacggattaatatccggaatgcttgttacatatctggaaatggggctgaggtggtaatagatactcaagacaaggcagttattagatgctgcatgatggatatgtggcctggggtagtcggtatggaagcagtaacttttgtaaatgttaagtttaggggagatggttataatggaatagtgtttatggccaataccaaacttatattgcatggttgtagcttttttggtttcaacaatacctgtgtagatgcctggggacaggttagtgtacggggatgtagtttctatgcgtgttggattgccacagctggcagaaccaagagtcaattgtctctgaagaaatgcatatttcaaagatgtaacctgggcattctgaatgaaggcgaagcaagggtccgccactgcgcttctacagatactggatgttttattttgattaagggaaatgccagcgtaaagcataacatgatttgcggtgcttccgatgagaggccttatcaaatgctcacttgtgctggtgggcattgtaatatgctggctactgtgcatattgtttcccatcaacgcaaaaaatggcctgtttttgatcacaatgtgatgacgaagtgtaccatgcatgcaggtgggcgtagaggaatgtttatgccttaccagtgtaacatgaatcatgtgaaagtgttgttggaaccagatgccttttccagaatgagcctaacaggaatttttgacatgaacatgcaaatctggaagatcctgaggtatgatgatacgagatcgagggtacgcgcatgcgaatgcggaggcaagcatgccaggttccagccggtgtgtgtagatgtgactgaagatctcagaccggatcatttggttattgcccgcactggagcagagttcggatccagtggagaagaaactgactaaggtgagtattgggaaaactttggggtgggattttcagatggacagattgagtaaaaatttgttttttctgtcttgcagctgtcatgagtggaaacgcttcttttaaggggggagtcttcagcccttatctgacagggcgtctcccatcctgggcaggagttcgtcagaatgttatgggatctactgtggatggaagacccgtccaacccgccaattcttcaacgctgacctatgctactttaagttcttcacctttggacgcagctgcagctgccgccgccgcttctgttgccgctaacactgtgcttggaatgggttactatggaagcatcatggctaattccacttcctctaataacccttctaccctgactcaggacaagttacttgtccttttggcccagctggaggctttgacccaacgtctgggtgaactttctcagcaggtggtcgagttgcgagtacaaactgagtctgctgtcggcacggcaaagtctaaataaaaaaatcccagaatcaatgaataaataaacaagcttgttgttgatttaaaatcaagtgtttttatttcatttttcgcgcacggtatgccctagaccaccgatctctatcattgagaactcggtggattttttccaggatcctatagaggtgggattgaatgtttagatacatgggcattaggccgtctttggggtggagatagctccattgaagggattcatgctccggggtagtgttgtaaatcacccagtcataacaaggtcgcagtgcatggtgttgcacaatatcttttagaagtaggctgattgccacagataagcccttggtgtaggtgtttacaaaccggttgagctgggatgggtgcattcggggtgaaattatgtgcattttggattggatttttaagttggcaatattgccgccaagatcccgtcttgggttcatgttatgaaggaccaccaagacggtgtatccggtacatttaggaaatttatcgtgcagcttggatggaaaagcgtggaaaaatttggagacacccttgtgtcctccaagattttccatgcactcatccatgataatagcaatggggccgtgggcagcggcgcgggcaaacacgttccgtgggtctgacacatcatagttatgttcctgagttaaatcatcataagccattttaatgaatttggggcggagagtaccagattggggtatgaatgttccttcgggccccggagcatagttcccctcacagatttgcatttcccaagctttcagttccgagggtggaatcatgtccacctggggggctatgaaaaacaccgtttctggggcgggggtgattaattgtgatgatagcaaatttctgagcaattgagatttgccacatccggtggggccataaatgattccgattacgggttgcaggtggtagtttagggaacggcaactgccgtcttctcgaagcaagggggccacctcgttcatcatttcccttacatgcatattttcccgcaccaaatccattaggaggcgctctcctcctagtgatagaagttcttgtagtgaggaaaagtttttcagcggtttcagaccgtcagccatgggcattttggagagagtttgctgcaaaagttctagtctgttccacagttcagtgatgtgttctatggcatctcgatccagcagacctcctcgtttcgcgggtttggacggctcctggaatagggtatgagacgatgggcgtccagcgctgccagggttcggtccttccagggtctcagtgttcgagtcagggttgtttccgtcacagtgaaggggtgtgcgcctgcttgggcgcttgccagggtgcgcttcagactcatcctgctggtcgaaaacttctgtcgcttggcgccctgtatgtcggccaagtagcagtttaccatgagttcgtagttgagcgcctcggctgcgtggcctttggcgcggagcttacctttggaagttttcttgcataccgggcagtataggcatttcagcgcatacaacttgggcgcaaggaaaacggattctggggagtatgcatctgcgccgcaggaggcgcaaacagtttcacattccaccagccaggttaaatccggttcattggggtcaaaaacaagttttccgccatattttttgatgcgtttcttacctttggtctccatgagttcgtgtcctcgttgagtgacaaacaggctgtccgtgtccccgtagactgattttacaggcctcttctccagtggagtgcctcggtcttcttcgtacaggaactctgaccactctgatacaaaggcgcgcgtccaggccagcacaaaggaggctatgtgggaggggtagcgatcgttgtcaaccagggggtccaccttttccaaagtatgcaaacacatgtcaccctcttcaacatccaggaatgtgattggcttgtaggtgtatttcacgtgacctggggtccccgctgggggggtataaaagggggcggttctttgctcttcctcactgtcttccggatcgctgtccaggaacgtcagctgttggggtaggtattccctctcgaaggcgggcatgacctctgcactcaggttgtcagtttctaagaacgaggaggatttgatattgacagtgccggttgagatgcctttcatgaggttttcgtccatctggtcagaaaacacaatttttttattgtcaagtttggtggcaaatgatccatacagggcgttggataaaagtttggcaatggatcgcatggtttggttcttttccttgtccgcgcgctctttggcggcgatgttgagttggacatactcgcgtgccaggcacttccattcggggaagatagttgttaattcatctggcacgattctcacttgccaccctcgattatgcaaggtaattaaatccacactggtggccacctcgcctcgaaggggttcattggtccaacagagcctacctcctttcctagaacagaaagggggaagtgggtctagcataagttcatcgggagggtctgcatccatggtaaagattcccggaagtaaatccttatcaaaatagctgatgggagtggggtcatctaaggccatttgccattctcgagctgccagtgcgcgctcatatgggttaaggggactgccccatggcatgggatgggtgagtgcagaggcatacatgccacagatgtcatagacgtagatgggatcctcaaagatgcctatgtaggttggatagcatcgcccccctctgatacttgctcgcacatagtcatatagttcatgtgatggcgctagcagccccggacccaagttggtgcgattgggtttttctgttctgtagacgatctggcgaaagatggcgtgagaattggaagagatggtgggtctttgaaaaatgttgaaatgggcatgaggtagacctacagagtctctgacaaagtgggcataagattcttgaagcttggttaccagttcggcggtgacaagtacgtctagggcgcagtagtcaagtgtttcttgaatgatgtcataacctggttggtttttcttttcccacagttcgcggttgagaaggtattcttcgcgatccttccagtactcttctagcggaaacccgtctttgtctgcacggtaagatcctagcatgtagaactgattaactgccttgtaagggcagcagcccttctctacgggtagagagtatgcttgagcagcttttcgtagcgaagcgtgagtaagggcaaaggtgtctctgaccatgactttgaggaattggtatttgaagtcgatgtcgtcacaggctccctgttcccagagttggaagtctacccgtttcttgtaggcggggttgggcaaagcgaaagtaacatcattgaagagaatcttgccggccctgggcatgaaattgcgagtgatgcgaaaaggctgtggtacttccgctcggttattgataacctgggcagctaggacgatctcgtcgaaaccgttgatgttgtgtcctacgatgtataattctatgaaacgcggcgtgcctctgacgtgaggtagcttactgagctcatcaaaggttaggtctgtggggtcagataaggcgtagtgttcgagagcccattcgtgcaggtgaggattcgctttaaggaaggaggaccagaggtccactgccagtgctgtttgtaactggtcccggtactgacgaaaatgccgtccgactgccattttttctggggtgacgcaatagaaggtttgggggtcctgccgccagcgatcccacttgagttttatggcgaggtcataggcgatgttgacgagccgctggtctccagagagtttcatgaccagcatgaaggggattagctgcttgccaaaggaccccatccaggtgtaggtttccacatcgtaggtgagaaagagcctttctgtgcgaggatgagagccaatcgggaagaactggatctcctgccaccagttggaggaatggctgttgatgtgatggaagtagaactccctgcgacgcgccgagcattcatgcttgtgcttgtacagacggccgcagtagtcgcagcgttgcacgggttgtatctcgtgaatgagttgtacctggcttcccttgacgagaaatttcagtgggaagccgaggcctggcgattgtatctcgtgctttactatgttgtctgcatcggcctgttcatcttctgtctcgatggtggtcatgctgacgagccctcgcgggaggcaagtccagacctcggcgcggcaggggcggagctcgaggacgagagcgcgcaggctggagctgtccagggtcctgagacgctgcggactcaggttagtaggcagtgtcaggagattaacttgcatgatcttttggagggcgtgcgggaggttcagatagtacttgatctcaacgggtccgttggtggagatgtcgatggcttgcagggttccgtgtcccttgggcgctaccaccgtgcccttgtttttcattttggacggcggtggctctgttgcttcttgcatgtttagaagcggtgtcgagggcgcgcaccgggcggcaggggcggctcgggacccggcggcatggctggcagtggtacgtcggcgccgcgcgcgggtaggttctggtactgcgccctgagaagactcgcatgcgcgacgacgcggcggttgacatcctggatctgacgcctctgggtgaaagctaccggccccgtgagcttgaacctgaaagagagttcaacagaatcaatctcggtatcgttgacggcggcttgcctaaggatttcttgcacgtcaccagagttgtcctggtaggcgatctccgccatgaactgctcgatctcttcctcttgaagatctccgcggcccgctctctcgacggtggccgcgaggtcgttggagatgcgcccaatgagttgagagaatgcattcatgcccgcctcgttccagacgcggctgtagaccacggcccccacgggatctctcgcgcgcatgaccacctgggcgaggttgagctccacgtggcgggtgaagaccgcatagttgcataggcgctggaaaaggtagttgagtgtggtggcgatgtgctcggtgacgaagaaatacatgatccatcgtctcagcggcatctcgctgacatcgcccagagcttccaagcgctccatggcctcgtagaagtccacggcaaaattaaaaaactgggagtttcgcgcggacacggtcaactcctcttccagaagacggataagttcggcgatggtggtgcgcacctcgcgctcgaaagcccctgggatttcttcctcaatctcttcttcttccactaacatctcttcctcttcaggtggggctgcaggaggagggggaacgcggcgacgccggcggcgcacgggcagacggtcgatgaatctttcaatgacctctccgcggcggcggcgcatggtttcagtgacggcgcggccgttctcgcgcggtcgcagagtaaaaacaccgccgcgcatctccttaaagtggtgactgggaggttctccgtttgggagggagagggcgctgattatacattttattaattggcccgtagggactgcacgcagagatctgatcgtgtcaagatccacgggatctgaaaacctttcgacgaaagcgtctaaccagtcacagtcacaaggtaggctgagtacggcttcttgtgggcgggggtggttatgtgttcggtctgggtcttctgtttcttcttcatctcgggaaggtgagacgatgctgctggtgatgaaattaaagtaggcagttctaagacggcggatggtggcgaggagcaccaggtctttgggtccggcttgctggatacgcaggcgattggccattccccaagcattatcctgacatctagcaagatctttgtagtagtcttgcatgagccgttctacgggcacttcttcctcacccgttctgccatgcatacgtgtgagtccaaatccgcgcattggttgtaccagtgccaagtcagctacgactctttcggcgaggatggcttgctgtacttgggtaagggtggcttgaaagtcatcaaaatccacaaagcggtggtaagctcctgtattaatggtgtaagcacagttggccatgactgaccagttaactgtctggtgaccagggcgcacgagctcggtgtatttaaggcgcgaataggcgcgggtgtcaaagatgtaatcgttgcaggtgcgcaccagatactggtaccctataagaaaatgcggcggtggttggcggtagagaggccatcgttctgtagctggagcgccaggggcgaggtcttccaacataaggcggtgatagccgtagatgtacctggacatccaggtgattcctgcggcggtagtagaagcccgaggaaactcgcgtacgcggttccaaatgttgcgtagcggcatgaagtagttcattgtaggcacggtttgaccagtgaggcgcgcgcagtcattgatgctctatagacacggagaaaatgaaagcgttcagcgactcgactccgtagcctggaggaacgtgaacgggttgggtcgcggtgtaccccggttcgagacttgtactcgagccggccggagccgcggctaacgtggtattggcactcccgtctcgacccagcctacaaaaatccaggatacggaatcgagtcgttttgctggtttccgaatggcagggaagtgagtcctattttttttttttgccgctcagatgcatcccgtgctgcgacagatgcgcccccaacaacagcccccctcgcagcagcagcagcagcaatcacaaaaggctgtccctgcaactactgcaactgccgccgtgagcggtgcgggacagcccgcctatgatctggacttggaagagggcgaaggactggcacgtctaggtgcgccttcacccgagcggcatccgcgagttcaactgaaaaaagattctcgcgaggcgtatgtgccccaacagaacctatttagagacagaagcggcgaggagccggaggagatgcgagcttcccgctttaacgcgggtcgtgagctgcgtcacggtttggaccgaagacgagtgttgcgggacgaggatttcgaagttgatgaaatgacagggatcagtcctgccagggcacacgtggctgcagccaaccttgtatcggcttacgagcagacagtaaaggaagagcgtaacttccaaaagtcttttaataatcatgtgcgaaccctgattgcccgcgaagaagttacccttggtttgatgcatttgtgggatttgatggaagctatcattcagaaccctactagcaaacctctgaccgcccagctgtttctggtggtgcaacacagcagagacaatgaggctttcagagaggcgctgctgaacatcaccgaacccgaggggagatggttgtatgatcttatcaacattctacagagtatcatagtgcaggagcggagcctgggcctggccgagaaggtggctgccatcaattactcggttttgagcttgggaaaatattacgctcgcaaaatctacaagactccatacgttcccatagacaaggaggtgaagatagatgggttctacatgcgcatgacgctcaaggtcttgaccctgagcgatgatcttggggtgtatcgcaatgacagaatgcatcgcgcggttagcgccagcaggaggcgcgagttaagcgacagggaactgatgcacagtttgcaaagagctctgactggagctggaaccgagggtgagaattacttcgacatgggagctgacttgcagtggcagcctagtcgcagggctctgagcgccgcgacggcaggatgtgagcttccttacatagaagaggcggatgaaggcgaggaggaagagggcgagtacttggaagactgatggcacaacccgtgttttttgctagatggaacagcaagcaccggatcccgcaatgcgggcggcgctgcagagccagccgtccggcattaactcctcggacgattggacccaggccatgcaacgtatcatggcgttgacgactcgcaaccccgaagcctttagacagcaaccccaggccaaccgtctatcggccatcatggaagctgtagtgccttcccgctctaatcccactcatgagaaggtcctggccatcgtgaacgcgttggtggagaacaaagctattcgtccagatgaggccggactggtatacaacgctctcttagaacgcgtggctcgctacaacagtagcaatgtgcaaaccaatttggaccgtatgataacagatgtacgcgaagccgtgtctcagcgcgaaaggttccagcgtgatgccaacctgggttcgctggtggcgttaaatgctttcttgagtactcagcctgctaatgtgccgcgtggtcaacaggattatactaactttttaagtgctttgagactgatggtatcagaagtacctcagagcgaagtgtatcagtccggtcctgattacttctttcagactagcagacagggcttgcagacggtaaatctgagccaagcttttaaaaaccttaaaggtttgtggggagtgcatgccccggtaggagaaagagcaaccgtgtctagcttgttaactccgaactcccgcctattattactgttggtagctcctttcaccgacagcggtagcatcgaccgtaattcctatttgggttacctactaaacctgtatcgcgaagccatagggcaaagtcaggtggacgagcagacctatcaagaaattacccaagtcagtcgcgctttgggacaggaagacactggcagtttggaagccactctgaacttcttgcttaccaatcggtctcaaaagatccctcctcaatatgctcttactgcggaggaggagaggatccttagatatgtgcagcagagcgtgggattgtttctgatgcaagagggggcaactccgactgcagcactggacatgacagcgcgaaatatggagcccagcatgtatgccagtaaccgacctttcattaacaaactgctggactacttgcacagagctgccgctatgaactctgattatttcaccaatgccatcttaaacccgcactggctgcccccacctggtttctacacgggcgaatatgacatgcccgaccctaatgacggatttctgtgggacgacgtggacagcgatgttttttcacctctttctgatcatcgcacgtggaaaaaggaaggcggcgatagaatgcattcttctgcatcgctgtccggggtcatgggtgctaccgcggctgagcccgagtctgcaagtccttttcctagtctacccttttctctacacagtgtacgtagcagcgaagtgggtagaataagtcgcccgagtttaatgggcgaagaggagtatctaaacgattccttgctcagaccggcaagagaaaaaaatttcccaaacaatggaatagaaagtttggtggataaaatgagtagatggaagacttatgctcaggatcacagagacgagcctgggatcatggggattacaagtagagcgagccgtagacgccagcgccatgacagacagaggggtcttgtgtgggacgatgaggattcggccgatgatagcagcgtgctggacttgggtgggagaggaaggggcaacccgtttgctcatttgcgccctcgcttgggtggtatgttgtaaaaaaaaataaaaaaaaaactcaccaaggccatggcgacgagcgtacgttcgttcttctttattatctgtgtctagtataatgaggcgagtcgtgctaggcggagcggtggtgtatccggagggtcctcctccttcgtacgagagcgtgatgcagcagcagcaggcgacggcggtgatgcaatccccactggaggctccctttgtgcctccgcgatacctggcacctacggagggcagaaacagcattcgttattcggaactggcacctcagtacgataccaccaggttgtatctggtggacaacaagtcggcggacattgcttctctgaactatcagaatgaccacagcaacttcttgaccacggtggtgcaaaacaatgactttacccctacggaagccagcacccagaccattaactttgatgaacgatcgcggtggggcggtcagctaaagaccatcatgcatactaacatgccaaacgtgaacgagtatatgtttagtaacaagttcaaagcgcgtgtgatggtgtccagaaaacctcccgacggtgctgcagttggggatacttatgatcacaagcaggatattttgaaatatgagtggttcgagtttactttgccagaaggcaacttttcagttactatgactattgatttgatgaacaatgccatcatagataattacttgaaagtgggtagacagaatggagtgcttgaaagtgacattggtgttaagttcgacaccaggaacttcaagctgggatgggatcccgaaaccaagttgatcatgcctggagtgtatacgtatgaagccttccatcctgacattgtcttactgcctggctgcggagtggattttaccgagagtcgtttgagcaaccttcttggtatcagaaaaaaacagccatttcaagagggttttaagattttgtatgaagatttagaaggtggtaatattccggccctcttggatgtagatgcctatgagaacagtaagaaagaacaaaaagccaaaatagaagctgctacagctgctgcagaagctaaggcaaacatagttgccagcgactctacaagggttgctaacgctggagaggtcagaggagacaattttgcgccaacacctgttccgactgcagaatcattattggccgatgtgtctgaaggaacggacgtgaaactcactattcaacctgtagaaaaagatagtaagaatagaagctataatgtgttggaagacaaaatcaacacagcctatcgcagttggtatctttcgtacaattatggcgatcccgaaaaaggagtgcgttcctggacattgctcaccacctcagatgtcacctgcggagcagagcaggtctactggtcgcttccagacatgatgaaggatcctgtcactttccgctccactagacaagtcagtaactaccctgtggtgggtgcagagcttatgcccgtcttctcaaagagcttctacaacgaacaagctgtgtactcccagcagctccgccagtccacctcgcttacgcacgtcttcaaccgctttcctgagaaccagattttaatccgtccgccggcgcccaccattaccaccgtcagtgaaaacgttcctgctctcacagatcacgggaccctgccgttgcgcagcagtatccggggagtccaacgtgtgaccgttactgacgccagacgccgcacctgtccctacgtgtacaaggcactgggcatagtcgcaccgcgcgtcctttcaagccgcactttctaaaaaaaaaaaaaatgtccattcttatctcgcccagtaataacaccggttggggtctgcgcgctccaagcaagatgtacggaggcgcacgcaaacgttctacccaacatcctgtccgtgttcgcggacattttcgcgctccatggggcgccctcaagggccgcactcgcgttcgaaccaccgtcgatgatgtaatcgatcaggtggttgccgacgcccgtaattatactcctactgcgcctacatctactgtggatgcagttattgacagtgtagtggctgacgctcgcaactatgctcgacgtaagagccggcgaaggcgcattgccagacgccaccgagctaccactgccatgcgagccgcaagagctctgctacgaagagctagacgcgtggggcgaagagccatgcttagggcggccagacgtgcagcttcgggcgccagcgccggcaggtcccgcaggcaagcagccgctgtcgcagcggcgactattgccgacatggcccaatcgcgaagaggcaatgtatactgggtgcgtgacgctgccaccggtcaacgtgtacccgtgcgcacccgtccccctcgcacttagaagatactgagcagtctccgatgttgtgtcccagcggcgaggatgtccaagcgcaaatacaaggaagaaatgctgcaggttatcgcacctgaagtctacggccaaccgttgaaggatgaaaaaaaaccccgcaaaatcaagcgggttaaaaaggacaaaaaagaagaggaagatggcgatgatgggctggcggagtttgtgcgcgagtttgccccacggcgacgcgtgcaatggcgtgggcgcaaagttcgacatgtgttgagacctggaacttcggtggtctttacacccggcgagcgttcaagcgctacttttaagcgttcctatgatgaggtgtacggggatgatgatattcttgagcaggcggctgaccgattaggcgagtttgcttatggcaagcgtagtagaataacttccaaggatgagacagtgtcgatacccttggatcatggaaatcccacccctagtcttaaaccggtcactttgcagcaagtgttacccgtaactccgcgaacaggtgttaaacgcgaaggtgaagatttgtatcccactatgcaactgatggtacccaaacgccagaagttggaggacgttttggagaaagtaaaagtggatccagatattcaacctgaggttaaagtgagacccattaagcaggtagcgcctggtctgggggtacaaactgtagacattaagattcccactgaaagtatggaagtgcaaactgaacccgcaaagcctactgccacctccactgaagtgcaaacggatccatggatgcccatgcctattacaactgacgccgccggtcccactcgaagatcccgacgaaagtacggtccagcaagtctgttgatgcccaattatgttgtacacccatctattattcctactcctggttaccgaggcactcgctactatcgcagccgaaacagtacctcccgccgtcgccgcaagacacctgcaaatcgcagtcgtcgccgtagacgcacaagcaaaccgactcccggcgccctggtgcggcaagtgtaccgcaatggtagtgcggaacctttgacactgccgcgtgcgcgttaccatccgagtatcatcacttaatcaatgttgccgctgcctccttgcagatatggccctcacttgtcgccttcgcgttcccatcactggttaccgaggaagaaactcgcgccgtagaagagggatgttgggacgcggaatgcgacgctacaggcgacggcgtgctatccgcaagcaattgcggggtggttttttaccagccttaattccaattatcgctgctgcaattggcgcgataccaggcatagcttccgtggcggttcaggcctcgcaacgacattgacattggaaaaaaacgtataaataaaaaaaaaaaaatacaatggactctgacactcctggtcctgtgactatgttttcttagagatggaagacatcaatttttcatccttggctccgcgacacggcacgaagccgtacatgggcacctggagcgacatcggcacgagccaactgaacgggggcgccttcaattggagcagtatctggagcgggcttaaaaattttggctcaaccataaaaacatacgggaacaaagcttggaacagcagtacaggacaggcgcttagaaataaacttaaagaccagaacttccaacaaaaagtagtcgatgggatagcttccggcatcaatggagtggtagatttggctaaccaggctgtgcagaaaaagataaacagtcgtttggacccgccgccagcaaccccaggtgaaatgcaagtggaggaagaaattcctccgccagaaaaacgaggcgacaagcgtccgcgtcccgatttggaagagacgctggtgacgcgcgtagatgaaccgccttcttatgaggaagcaacgaagcttggaatgcccaccactagaccgatagccccaatggccaccggggtgatgaaaccttctcagttgcatcgacccgtcaccttggatttgccccctccccctgctgctactgctgtacccgcttctaagcctgtcgctgccccgaaaccagtcgccgtagccaggtcacgtcccgggggcgctcctcgtccaaatgcgcactggcaaaatactctgaacagcatcgtgggtctaggcgtgcaaagtgtaaaacgccgtcgctgcttttaattaaatatggagtagcgcttaacttgcctatctgtgtatatgtgtcattacacgccgtcacagcagcagaggaaaaaaggaagaggtcgtgcgtcgacgctgagttactttcaagatggccaccccatcgatgctgccccaatgggcatacatgcacatcgccggacaggatgcttcggagtacctgagtccgggtctggtgcagttcgcccgcgccacagacacctacttcaatctgggaaataagtttagaaatcccaccgtagcgccgacccacgatgtgaccaccgaccgtagccagcggctcatgttgcgcttcgtgcccgttgaccgggaggacaatacatactcttacaaagtgcggtacaccctggccgtgggcgacaacagagtgctggatatggccagcacgttctttgacattaggggtgtgttggacagaggtcccagtttcaaaccctattctggtacggcttacaactccctggctcctaaaggcgctccaaatacatctcagtggattgcagaaggtgtaaaaaatacaactggtgaggaacacgtaacagaagaggaaaccaatactactacttacacttttggcaatgctcctgtaaaagctgaagctgaaattacaaaagaaggactcccagtaggtttggaagtttcagatgaagaaagtaaaccgatttatgctgataaaacatatcagccagaacctcagctgggagatgaaacttggactgaccttgatggaaaaaccgaaaagtatggaggcagggctctcaaacccgatactaagatgaaaccatgctacgggtcctttgccaaacctactaatgtgaaaggcggtcaggcaaaacaaaaaacaacggagcagccaaatcagaaagtcgaatatgatatcgacatggagttttttgatgcggcatcgcagaaaacaaacttaagtcctaaaattgtcatgtatgcagaaaatgtaaatttggaaactccagacactcatgtagtgtacaaacctggaacagaagacacaagttccgaagctaatttgggacaacaatctatgcccaacagacccaactacattggcttcagagataactttattggacttatgtactataacagtactggtaacatgggggtgctggctggtcaagcgtctcagttaaatgcagtggttgacttgcaggacagaaacacagaactttcttaccaactcttgcttgactctctgggcgacagaaccagatactttagcatgtggaatcaggctgtggacagttatgatcctgatgtacgtgttattgaaaatcatggtgtggaagatgaacttcccaactactgttttccactggacggcataggtgttccaacaaccagttacaaatcaatagttccaaatggagacaatgcgcctaattggaaggaacctgaagtaaatggaacaagtgagatcggacagggtaatttgtttgccatggaaattaaccttcaagccaatctatggcgaagtttcctttattccaatgtggctctatatctcccagactcgtacaaatacaccccgtccaatgtcactcttccagaaaacaaaaacacctacgactacatgaacgggcgggtggtgccgccatctctagtagacacctatgtgaacattggtgccaggtggtctctggatgccatggacaatgtcaacccattcaaccaccaccgtaacgctggcttgcgttaccgatccatgcttctgggtaacggacgttatgtgcctttccacatacaagtgcctcaaaaattcttcgctgttaaaaacctgctgcttctcccaggctcctacacttatgagtggaactttaggaaggatgtgaacatggttctacagagttccctcggtaacgacctgcgggtagatggcgccagcatcagtttcacgagcatcaacctctatgctacttttttccccatggctcacaacaccgcttccacccttgaagccatgctgcggaatgacaccaatgatcagtcattcaacgactacctatctgcagctaacatgctctaccccattcctgccaatgcaaccaatattcccatttccattccttctcgcaactgggcggctttcagaggctggtcatttaccagactgaaaaccaaagaaactccctctttggggtctggatttgacccctactttgtctattctggttctattccctacctggatggtaccttctacctgaaccacacttttaagaaggtttccatcatgtttgactcttcagtgagctggcctggaaatgacaggttactatctcctaacgaatttgaaataaagcgcactgtggatggcgaaggctacaacgtagcccaatgcaacatgaccaaagactggttcttggtacagatgctcgccaactacaacatcggctatcagggcttctacattccagaaggatacaaagatcgcatgtattcatttttcagaaacttccagcccatgagcaggcaggtggttgatgaggtcaattacaaagacttcaaggccgtcgccataccctaccaacacaacaactctggctttgtgggttacatggctccgaccatgcgccaaggtcaaccctatcccgctaactatccctatccactcattggaacaactgccgtaaatagtgttacgcagaaaaagttcttgtgtgacagaaccatgtggcgcataccgttctcgagcaacttcatgtctatgggggcccttacagacttgggacagaatatgctctatgccaactcagctcatgctctggacatgacctttgaggtggatcccatggatgagcccaccctgctttatcttctcttcgaagttttcgacgtggtcagagtgcatcagccacaccgcggcatcatcgaggcagtctacctgcgtacaccgttctcggccggtaacgctaccacgtaagaagcttcttgcttcttgcaaatagcagctgcaaccatggcctgcggatcccaaaacggctccagcgagcaagagctcagagccattgtccaagacctgggttgcggaccctattttttgggaacctacgataagcgcttcccggggttcatggcccccgataagctcgcctgtgccattgtaaatacggccggacgtgagacggggggagagcactggttggctttcggttggaacccacgttctaacacctgctacctttttgatccttttggattctcggatgatcgtctcaaacagatttaccagtttgaatatgagggtctcctgcgccgcagcgctcttgctaccaaggaccgctgtattacgctggaaaaatctacccagaccgtgcagggtccccgttctgccgcctgcggacttttctgctgcatgttccttcacgcctttgtgcactggcctgaccgtcccatggacggaaaccccaccatgaaattgctaactggagtgccaaacaacatgcttcattctcctaaagtccagcccaccctgtgtgacaatcaaaaagcactctaccattttcttaatacccattcgccttattttcgctcccatcgtacacacatcgaaagggccactgcgttcgaccgtatggatgttcaataatgactcatgtaaacaacgtgttcaataaacatcactttatttttttacatgtatcaaggctctgcattacttatttatttacaagtcgaatgggttctgacgagaatcagaatgacccgcaggcagtgatacgttgcggaactgatacttgggttgccacttgaattcgggaatcaccaacttgggaaccggtatatcgggcaggatgtcactccacagctttctggtcagctgcaaagctccaagcaggtcaggagccgaaatcttgaaatcacaattaggaccagtgctttgagcgcgagagttgcggtacaccggattgcagcactgaaacaccatcagcgacggatgtctcacgcttgccagcacggtgggatctgcaatcatgcccacatccagatcttcagcattggcaatgctgaacggggtcatcttgcaggtctgcctacccatggcgggcacccaattaggcttgtggttgcaatcgcagtgcagggggatcagtatcatcttggcctgatcctgtctgattcctggatacacggctctcatgaaagcatcatattgcttgaaagcctgctgggctttactaccctcggtataaaacatcccgcaggacctgctcgaaaactggttagctgcacagccggcatcattcacacagcagcgggcgtcattgttagctatttgcaccacacttctgccccagcggttttgggtgattttggttcgctcgggattctcctttaaggctcgttgtccgttctcgctggccacatccatctcgataatctgctccttctgaatcataatattgccatgcaggcacttcagcttgccctcataatcattgcagccatgaggccacaacgcacagcctgtacattcccaattatggtgggcgatctgagaaaaagaatgtatcattccctgcagaaatcttcccatcatcgtgctcagtgtcttgtgactagtgaaagttaactggatgcctcggtgctcctcgtttacgtactggtgacagatgcgcttgtattgttcgtgttgctcaggcattagtttaaaagaggttctaagttcgttatccagcctgtacttctccatcagcagacacatcacttccatgcctttctcccaagcagacaccaggggcaagctaatcggattcttaacagtgcaggcagcagctcctttagccagagggtcatctttagcgatcttctcaatgcttcttttgccatccttctcaacgatgcgcacgggcgggtagctgaaacccactgctacaagttgcgcctcttctctttcttcttcgctgtcttgactgatgtcttgcatggggatatgtttggtcttccttggcttctttttggggggtatcggaggaggaggactgtcgctccgttccggagacagggaggattgtgacgtttcgctcaccattaccaactgactgtcggtagaagaacctgaccccacacggcgacaggtgtttctcttcgggggcagaggtggaggcgattgcgaagggctgcggtccgacctggaaggcggatgactggcagaaccccttccgcgttcgggggtgtgctccctgtggcggtcgcttaactgatttccttcgcggctggccattgtgttctcctaggcagagaaacaacagacatggaaactcagccattgctgtcaacatcgccacgagtgccatcacatctcgtcctcagcgacgaggaaaaggagcagagcttaagcattccaccgcccagtcctgccaccacctctaccctagaagataaggaggtcgacgcatctcatgacatgcagaataaaaaagcgaaagagtctgagacagacatcgagcaagacccgggctatgtgacaccggtggaacacgaggaagagttgaaacgctttctagagagagaggatgaaaactgcccaaaacaacgagcagataactatcaccaagatgctggaaatagggatcagaacaccgactacctcatagggcttgacggggaagacgcgctccttaaacatctagcaagacagtcgctcatagtcaaggatgcattattggacagaactgaagtgcccatcagtgtggaagagctcagccgcgcctacgagcttaacctcttttcacctcgtactccccccaaacgtcagccaaacggcacctgcgagccaaatcctcgcttaaacttttatccagcttttgctgtgccagaagtactggctacctatcacatcttttttaaaaatcaaaaaattccagtctcctgccgcgctaatcgcacccgcgccgatgccctactcaatctgggacctggttcacgcttacctgatatagcttccttggaagaggttccaaagatcttcgagggtctgggcaataatgagactcgggccgcaaatgctctgcaaaagggagaaaatggcatggatgagcatcacagcgttctggtggaattggaaggcgataatgccagactcgcagtactcaagcgaagcatcgaggtcacacacttcgcatatcccgctgtcaacctgccccctaaagtcatgacggcggtcatggaccagttactcattaagcgcgcaagtcccctttcagaagacatgcatgacccagatgcctgtgatgagggtaaaccagtggtcagtgatgagcagctaacccgatggctgggcaccgactctcccagggatttggaagagcgtcgcaagcttatgatggccgtggtgctggttaccgtagaactagagtgtctccgacgtttctttaccgattcagaaaccttgcgcaaactcgaagagaatctgcactacacttttagacacggctttgtgcggcaggcatgcaagatatctaacgtggaactcaccaacctggtttcctacatgggtattctgcatgagaatcgcctaggacaaagcgtgctgcacagcaccctgaagggggaagcccgccgtgattacatccgcgattgtgtctatctgtacctgtgccacacgtggcaaaccggcatgggtgtatggcagcaatgtttagaagaacagaacttgaaagagcttgacaagctcttacagaaatctcttaaggttctgtggacagggttcgacgagcgcaccgtcgcttccgacctggcagacctcatcttcccagagcgtctcagggttactttgcgaaacggattgcctgactttatgagccagagcatgcttaacaattttcgctctttcatcctggaacgctccggtatcctgcccgccacctgctgcgcactgccctccgactttgtgcctctcacctaccgcgagtgccccccgccgctatggagtcactgctacctgttccgtctggccaactatctctcctaccactcggatgtgatcgaggatgtgagcggagacggcttgctggagtgtcactgccgctgcaatctgtgcacgccccaccggtccctagcttgcaacccccagttgatgagcgaaacccagataataggcacctttgaattgcaaggccccagcagccaaggcgatgggtcttctcctgggcaaagtttaaaactgaccccgggactgtggacctccgcctacttgcgcaagtttgctccggaagattaccacccctatgaaatcaagttctatgaggaccaatcacagcctccaaaggccgaactttcggcctgcgtcatcacccagggggcaattctggcccaattgcaagccatccaaaaatcccgccaagaatttctactgaaaaagggtaagggggtctaccttgacccccagaccggcgaggaactcaacacaaggttccctcaggatgtcccaacgacgagaaaacaagaagttgaaggtgcagccgccgcccccagaagatatggaggaagattgggacagtcaggcagaggaggcggaggaggacagtctggaggacagtctggaggaagacagtttggaggaggaaaacgaggaggcagaggaggtggaagaagtaaccgccgacaaacagttatcctcggctgcggagacaagcaacagcgctaccatctccgctccgagtcgaggaacccggcggcgtcccagcagtagatgggacgagaccggacgcttcccgaacccaaccagcgcttccaagaccggtaagaaggatcggcagggatacaagtcctggcgggggcataagaatgccatcatctcctgcttgcatgagtgcgggggcaacatatccttcacgcggcgctacttgctattccaccatggggtgaactttccgcgcaatgttttgcattactaccgtcacctccacagcccctactatagccagcaaatcccggcagtctcgacagataaagacagcggcggcgacctccaacagaaaaccagcagcggcagttagaaaatacacaacaagtgcagcaacaggaggattaaagattacagccaacgagccagcgcaaacccgagagttaagaaatcggatctttccaaccctgtatgccatcttccagcagagtcggggtcaagagcaggaactgaaaataaaaaaccgatctctgcgttcgctcaccagaagttgtttgtatcacaagagcgaagatcaacttcagcgcactctcgaggacgccgaggctctcttcaacaagtactgcgcgctgactcttaaagagtaggcagcgaccgcgcttattcaaaaaaggcgggaattacatcatcctcgacatgagtaaagaaattcccacgccttacatgtggagttatcaaccccaaatgggattggcggcaggcgcctcccaggactactccacccgcatgaattggctcagcgccgggccttctatgatttctcgagttaatgatatacgcgcctaccgaaaccaaatacttttggaacagtcagctcttaccaccacgccccgccaacaccttaatcccagaaattggcccgccgccctagtgtaccaggaaagtcccgctcccaccactgtattacttcctcgagacgcccaggccgaagtccaaatgactaatgcaggtgcgcagttagctggcggctccaccctatgtcgtcacaggcctcggcataatataaaacgcctgatgatcagaggccgaggtatccagctcaacgacgagtcggtgagctctccgcttggtctacgaccagacggaatctttcagattgccggctgcgggagatcttccttcacccctcgtcaggctgttctgactttggaaagttcgtcttcgcaaccccgctcgggcggaatcgggaccgttcaatttgtggaggagtttactccctctgtctacttcaaccccttctccggatctcctgggcattacccggacgagttcataccgaacttcgacgcgattagcgagtcagtggacggctacgattgatgtctggtgacgcggctgagctatctcggctgcgacatctagaccactgccgccgctttcgctgctttgcccgggaactcattgagttcatctacttcgaactccccaaggatcaccctcaaggtccggcccacggagtgcggatttctatcgaaggcaaaatagactctcgcctgcaacgaattttctcccagcggcccgtgctgatcgagcgagaccagggaaacaccacggtttccatctactgcatttgtaatcaccccggattgcatgaaagcctttgctgtcttatgtgtactgagtttaataaaaactgaattaagactctcctacggactgccgcttcttcaacccggattttacaaccagaagaacgaaacttttcctgtcgtccaggactctgttaacttcacctttcctactcacaaactagaagctcaacgactacaccgcttttccagaagcattttccctactaatactactttcaaaaccggaggtgagctccaaggtcttcctacagaaaacccttgggtggaagcgggccttgtagtgctaggaattcttgcgggtgggcttgtgattattctttgctacctatacacaccttgcttcactttcttagtggtgttgtggtattggtttaaaaaatggggcccatactagtcttgcttgttttactttcgcttttggaaccgggttctgccaattacgatccatgtctagacttcgacccagaaaactgcacacttacttttgcacccgacacaagccgcatctgtggagttcatcgcctctcttacgaacttggcccccaacgacaaaaatttacctgcatggtgggaatcaaccccatagttatcacccagcaaagtggagatactaagggttgcattcactgctcctgcgattccatcgagtgcacctacaccctgctgaagaccctatgcggcctaagagacctgctaccaatgaattaaaaaatgattaataaaaaatcacttacttgaaatcagcaataaggtctctgttgaaattttctcccagcagcacctcacttccctcttcccaactctggtattctaaaccccgttcagcggcatactttctccatactttaaaggggatgtcaaattttagctcctctcctgtacccacaatcttcatgtctttcttcccagatgaccaagagagtccggctcagtgactccttcaaccctgtctacccctatgaagatgaaagcacctcccaacacccctttataaacccagggtttatttccccaaatggcttcacacaaagcccaaacggagttcttactttaaaatgtttaaccccactaacaaccacaggcggatctctacagctaaaagtgggagggggacttacagtggatgacaccaacggttttttgaaagaaaacataagtgccaccacaccactcgttaagactggtcactctataggtttaccactaggagccggattgggaacgaatgaaaataaactttgtatcaaattaggacaaggacttacattcaattcaaacaacatttgcattgatgacaatattaacaccttatggacaggagtcaaccccaccgaagccaactgtcaaatcatgaactccagtgaatctaatgattgcaaattaattctaacactagttaaaactggagcactagtcactgcatttgtttatgttataggagtatctaacaattttaatatgctaactacacacagaaatataaattttactgcagagctgtttttcgattctactggtaatttactaactagactctcatccctcaaaactccacttaatcataaatcaggacaaaacatggctactggtgccattactaatgctaaaggtttcatgcccagcacgactgcctatcctttcaatgataattctagagaaaaagaaaactacatttacggaacttgttactacacagctagtgatcgcactgcttttcccattgacatatctgtcatgcttaaccgaagagcaataaatgacgagacatcatattgtattcgtataacttggtcctggaacacaggagatgccccagaggtgcaaacctctgctacaaccctagtcacctccccatttaccttttactacatcagagaagacgactgacaaataaagtttgcgatcgcggctcccgccagatctagtaatcaattacggggtcattagttcatagcccatatatggagttccgcgttacataacttacggtaaatggcccgcctggctgaccgcccaacgacccccgcccattgacgtcaataatgacgtatgttcccatagtaacgccaatagggactttccattgacgtcaatgggtggagtatttacggtaaactgcccacttggcagtacatcaagtgtatcatatgccaagtacgccccctattgacgtcaatgacggtaaatggcccgcctggcattatgcccagtacatgaccttatgggactttcctacttggcagtacatctacgtattagtcatcgctattaccatgctgatgcggttttggcagtacatcaatgggcgtggatagcggtttgactcacggggatttccaagtctccaccccattgacgtcaatgggagtttgttttggcaccaaaatcaacgggactttccaaaatgtcgtaacaactccgccccattgacgcaaatgggcggtaggcgtgtacggtgggaggtctatataagcagagctggtttagtgaaccgtcagatcagatctttgtcgatcctaccatccactcgacacacccgccagcggccgctgccaagcttccgagctctcgaattcaaaggaggtacccaccatgggatggagctgtatcatcctcttcttggtagcaacagctacaggtgtccactccgaggttcagctggtggagtctggcggtggcctggtgcagccagggggctcactccgtttgtcctgtgcagcttctggctataccttcaccaactatggtatgaactgggtccgtcaggccccgggtaagggcctggaatgggttggatggattaacacctataccggtgaaccgacctatgctgcggatttcaaacgtcgttttactttttctctggacacctccaagagcacagcttacctgcagatgaacagcctgcgcgctgaggacactgccgtctattactgtgcaaagtacccgcactattatgggagcagccactggtatttcgacgtctggggtcaaggaaccctggtcaccgtctcctcggcctccaccaagggcccatcggtcttccccctggcaccctcctccaagagcacctctgggggcacagcggccctgggctgcctggtcaaggactacttccccgaaccggtgacggtgtcgtggaactcaggcgccctgaccagcggcgtgcacaccttcccggctgtcctacagtcctcaggactctactccctcagcagcgtggtgaccgtgccctccagcagcttgggcacccagacctacatctgcaacgtgaatcacaagcccagcaacaccaaggtcgacaagaaagttgagcccaaatcttgtgacaaaactcacacatgcccaccgtgcccagcacctgagctcctggggggaccgtcagtcttcctcttccccccaaaacccaaggacaccctcatgatctcccggacccctgaggtcacatgcgtggtggtggacgtgagccacgaagaccctgaggtcaagttcaactggtacgtggacggcgtggaggtgcataatgccaagacaaagccgcgggaggagcagtacaacagcacgtaccgtgtggtcagcgtcctcaccgtcctgcaccaggactggctgaatggcaaggagtacaagtgcaaggtctccaacaaagccctcccagcccccatcgagaaaaccatctccaaagccaaagggcagccccgagaaccacaggtgtacaccctgcccccatcccgggaggagatgaccaagaaccaggtcagcctgacctgcctggtcaaaggcttctatcccagcgacatcgccgtggagtgggagagcaatgggcagccggagaacaactacaagaccacgcctcccgtgctggactccgacggctccttcttcctctacagcaagctcaccgtggacaagagcaggtggcagcaggggaacgtcttctcatgctccgtgatgcacgaggctctgcacaaccactacacgcagaagagcctctccctgtctccgggtaaatgatctagactcgaggtttctagaagttgtctcctcctgcactgactgactgacctaacgttactggccgaagccgcttggaataaggccggtgtgcgtttgtctatatgttattttccaccatattgccgtcttttggcaatgtgagggcccggaaacctggccctgtcttcttgacgagcattcctaggggtctttcccctctcgccaaaggaatgcaaggtctgttgaatgtcgtgaaggaagcagttcctctggaagcttcttgaagacaaacaacgtctgtagcgaccctttgcaggcagcggaaccccccacctggcgacaggtgcctctgcggccaaaagccacgtgtataagatacacctgcaaaggcggcacaaccccagtgccacgttgtgagttggatagttgtggaaagagtcaaatggctcccctcaagcgtattcaacaaggggctgaaggatgcccagaaggtaccccattgtatgggatctgatctggggcctcggtgcacatgcttttcatgtgtttagtcgaggttaaaaaacgtctaggccccccgaaccacggggacgtggttttcctttgaaaaacacgatgataataacatggactggacctggcgcgtgttttgcctgctcgccgtggctcctggggcccacagcgatatccagatgacccagtccccgagctccctgtccgcctctgtgggcgatagggtcaccatcacctgcagcgcaagtcaggatattagcaactatttaaactggtatcaacagaaaccaggaaaagctccgaaagtcctgatttacttcacctcctctctccactctggagtcccttctcgcttctctggatccggttctgggacggatttcactctgaccatcagcagtctgcagccagaagacttcgcaacttattactgtcaacagtatagcaccgtgccgtggacgtttggacagggtaccaaggtggagatcaaacgaactgtggctgcaccatctgtcttcatcttcccgccatctgatgagcagttgaaatctggaactgcttctgttgtgtgcctgctgaataacttctatcccagagaggccaaagtacagtggaaggtggataacgccctccaatcgggtaactcccaggagagtgtcacagagcaggacagcaaggacagcacctacagcctcagcagcaccctgacgctgagcaaagcagactacgagaaacacaaagtctacgcctgcgaagtcacccatcagggcctgagctcgcccgtcacaaagagcttcaacaggggagagtgttaagctagcttgactgactgagatacagcgtaccttcagctcacagacatgataagatacattgatgagtttggacaaaccacaactagaatgcagtgaaaaaaatgctttatttgtgaaatttgtgatgctattgctttatttgtaaccattataagctgcaataaacaagttaacaacaacaattgcattcattttatgtttcaggttcagggggaggtgtgggaggttttttaaagcaagtaaaacctctacaaatgtggtagtcgtcagctatcctgcaggaacttgtttatttgaaaatcaattcacaaaatccgagtagttattttgcctcccccttcccatttaacagaatacaccaatctctccccacgcacagctttaaacatttggataccattagatatagacatggttttagattccacattccaaacagtttcagagcgagccaatctggggtcagtgatagataaaaatccatcgggatagtcttttaaagcgctttcacagtccaactgctgcggatgcgactccggagtctggatcacggtcatctggaagaagaacgatgggaatcataatccgaaaacggtatcggacgattgtgtctcatcaaacccacaagcagccgctgtctgcgtcgctccgtgcgactgctgtttatgggatcagggtccacagtgtcctgaagcatgattttaatagcccttaacatcaactttctggtgcgatgcgcgcagcaacgcattctgatttcactcaaatctttgcagtaggtacaacacattattacaatattgtttaataaaccataattaaaagcgctccagccaaaactcatatctgatataatcgcccctgcatgaccatcataccaaagtttaatataaattaaatgacgttccctcaaaaacacactacccacatacatgatctcttttggcatgtgcatattaacaatctgtctgtaccatggacaacgttggttaatcatgcaacccaatataaccttccggaaccacactgccaacaccgctcccccagccatgcattgaagtgaaccctgctgattacaatgacaatgaagaacccaattctctcgaccgtgaatcacttgagaatgaaaaatatctatagtggcacaacatagacataaatgcatgcatcttctcataatttttaactcctcaggatttagaaacatatcccagggaataggaagctcttgcagaacagtaaagctggcagaacaaggaagaccacgaacacaacttacactatgcatagtcatagtatcacaatctggcaacagcgggtggtcttcagtcatagaagctcgggtttcattttcctcacaacgtggtaactgggctctggtgtaagggtgatgtctggcgcatgatgtcgagcgtgcgcgcaaccttgtcataatggagttgcttcctgacattctcgtattttgtatagcaaaacgcggccctggcagaacacactcttcttcgccttctatcctgccgcttagcgtgttccgtgtgatagttcaagtacaaccacactcttaagttggtcaaaagaatgctggcttcagttgtaatcaaaactccatcgcatctaatcgttctgaggaaatcatccaagcaatgcaactggattgtgtttcaagcaggagaggagagggaagagacggaagaaccatgttaatttttattccaaacgatctcgcagtacttcaaattgtagatcgcgcagatggcatctctcgcccccactgtgttggtgaaaaagcacagctagatcaaaagaaatgcgattttcaaggtgctcaacggtggcttccagcaaagcctccacgcgcacatccaagaacaaaagaataccaaaagaaggagcattttctaactcctcaatcatcatattacattcctgcaccattcccagataattttcagctttccagccttgaattattcgtgtcagttcttgtggtaaatccaatccacacattacaaacaggtcccggagggcgccctccaccaccattcttaaacacaccctcataatgacaaaatatcttgctcctgtgtcacctgtagcgaattgagaatggcaacatcaattgacatgcccttggctctaagttcttctttaagttctagttgtaaaaactctctcatattatcaccaaactgcttagccagaagccccccgggaacaagagcaggggacgctacagtgcagtacaagcgcagacctccccaattggctccagcaaaaacaagattggaataagcatattgggaaccgccagtaatatcatcgaagttgctggaaatataatcaggcagagtttcttgtaaaaattgaataaaagaaaaatttgccaaaaaaacattcaaaacctctgggatgcaaatgcaataggttaccgcgctgcgctccaacattgttagttttgaattagtctgcaaaaataaaaaaaaaaacaagcgtcatatcatagtagcctgacgaacagatggataaatcagtctttccatcacaagacaagccacagggtctccagctcgaccctcgtaaaacctgtcatcatgattaaacaacagcaccgaaagttcctcgcggtgaccagcatgaataattcttgatgaagcatacaatccagacatgttagcatcagttaacgagaaaaaacagccaacatagcctttgggtataattatgcttaatcgtaagtatagcaaagccacccctcgcggatacaaagtaaaaggcacaggagaataaaaaatataattatttctctgctgctgttcaggcaacgtcgcccccggtccctctaaatacacatacaaagcctcatcagccatggcttaccagacaaagtacagcgggcacacaaagcacaagctctaaagtgactctccaacctctccacaatatatatatacacaagccctaaactgacgtaatgggagtaaagtgtaaaaaatcccgccaaacccaacacacaccccgaaactgcgtcaccagggaaaagtacagtttcacttccgcaatcccaacaggcgtaacttcctctttctcacggtacgtgatatcccactaacttgcaacgtcattttcccacggtcgcaccgccccttttagccgttaaccccacagccaatcaccacacgatccacactttttaaaatcacctcatttacatattggcaccattccatctataaggtatattatatagataga

SEQ ID NO: 10 - DNA, 201 bp, Artificial Sequence
  BX DNA sequence corresponding to and including bp 28166-28366 of the EnAd genome
aaaatgattaataaaaaatcacttacttgaaatcagcaataaggtctctgttgaaattttctcccagcagcacctcacttccctcttcccaactctggtattctaaaccccgttcagcggcatactttctccatactttaaaggggatgtcaaattttagctcctctcctgtacccacaatcttcatgtctttcttcccag

SEQ ID NO: 11 - DNA, 35 bp, Artificial Sequence
  BY DNA sequence corresponding to and including bp 29345-29379 of the EnAd genome
caaataaagtttaacttgtttatttgaaaatcaat

SEQ ID NO: 12 - DNA, 32326 bp, Artificial Sequence
  EnAd genome
tctatctatataatataccttatagatggaatggtgccaatatgtaaatgaggtgattttaaaaagtgtggatcgtgtggtgattggctgtggggttaacggctaaaaggggcggtgcgaccgtgggaaaatgacgttttgtgggggtggagtttttttgcaagttgtcgcgggaaatgtgacgcataaaaaggcttttttctcacggaactacttagttttcccacggtatttaacaggaaatgaggtagttttgaccggatgcaagtgaaaattgttgattttcgcgcgaaaactgaatgaggaagtgtttttctgaataatgtggtatttatggcagggtggagtatttgttcagggccaggtagactttgacccattacgtggaggtttcgattaccgtgttttttacctgaatttccgcgtaccgtgtcaaagtcttctgtttttacgtaggtgtcagctgatcgctagggtatttatacctcagggtttgtgtcaagaggccactcttgagtgccagcgagaagagttttctcctctgcgccggcagtttaataataaaaaaatgagagatttgcgatttctgcctcaggaaataatctctgctgagactggaaatgaaatattggagcttgtggtgcacgccctgatgggagacgatccggagccacctgtgcagctttttgagcctcctacgcttcaggaactgtatgatttagaggtagagggatcggaggattctaatgaggaagctgtaaatggcttttttaccgattctatgcttttagctgctaatgaagggttagaattagatccgcctttggacacttttgatactccaggggtaattgtggaaagcggtacaggtgtaagaaaattacctgatttgagttccgtggactgtgatttgcactgctatgaagacgggtttcctccgagtgatgaggaggaccatgaaaaggagcagtccatgcagactgcagcgggtgagggagtgaaggctgccaatgttggttttcagttggattgcccggagcttcctggacatggctgtaagtcttgtgaatttcacaggaaaaatactggagtaaaggaactgttatgttcgctttgttatatgagaacgcactgccactttatttacagtaagtgtgtttaagttaaaatttaaaggaatatgctgtttttcacatgtatattgagtgtgagttttgtgcttcttattataggtcctgtgtctgatgctgatgaatcaccatctcctgattctactacctcacctcctgagattcaagcacctgttcctgtggacgtgcgcaagcccattcctgtgaagcttaagcctgggaaacgtccagcagtggaaaaacttgaggacttgttacagggtggggacggacctttggacttgagtacacggaaacgtccaagacaataagtgttccatatccgtgtttacttaaggtgacgtcaatatttgtgtgacagtgcaatgtaataaaaatatgttaactgttcactggtttttattgctttttgggcggggactcaggtatataagtagaagcagacctgtgtggttagctcataggagctggctttcatccatggaggtttgggccattttggaagaccttaggaagactaggcaactgttagagaacgcttcggacggagtctccggtttttggagattctggttcgctagtgaattagctagggtagtttttaggataaaacaggactataaacaagaatttgaaaagttgttggtagattgcccaggactttttgaagctcttaatttgggccatcaggttcactttaaagaaaaagttttatcagttttagacttttcaaccccaggtagaactgctgctgctgtggcttttcttacttttatattagataaatggatcccgcagactcatttcagcaggggatacgttttggatttcatagccacagcattgtggagaacatggaaggttcgcaagatgaggacaatcttaggttactggccagtgcagcctttgggtgtagcgggaatcctgaggcatccaccggtcatgccagcggttctggaggaggaacagcaagaggacaacccgagagccggcctggaccctccagtggaggaggcggagtagctgacttgtctcctgaactgcaacgggtgcttactggatctacgtccactggacgggataggggcgttaagagggagagggcatctagtggtactgatgctagatctgagttggctttaagtttaatgagtcgcagacgtcctgaaaccatttggtggcatgaggttcagaaagagggaagggatgaagtttctgtattgcaggagaaatattcactggaacaggtgaaaacatgttggttggagcctgaggatgattgggaggtggccattaaaaattatgccaagatagctttgaggcctgataaacagtataagattactagacggattaatatccggaatgcttgttacatatctggaaatggggctgaggtggtaatagatactcaagacaaggcagttattagatgctgcatgatggatatgtggcctggggtagtcggtatggaagcagtaacttttgtaaatgttaagtttaggggagatggttataatggaatagtgtttatggccaataccaaacttatattgcatggttgtagcttttttggtttcaacaatacctgtgtagatgcctggggacaggttagtgtacggggatgtagtttctatgcgtgttggattgccacagctggcagaaccaagagtcaattgtctctgaagaaatgcatatttcaaagatgtaacctgggcattctgaatgaaggcgaagcaagggtccgccactgcgcttctacagatactggatgttttattttgattaagggaaatgccagcgtaaagcataacatgatttgcggtgcttccgatgagaggccttatcaaatgctcacttgtgctggtgggcattgtaatatgctggctactgtgcatattgtttcccatcaacgcaaaaaatggcctgtttttgatcacaatgtgatgacgaagtgtaccatgcatgcaggtgggcgtagaggaatgtttatgccttaccagtgtaacatgaatcatgtgaaagtgttgttggaaccagatgccttttccagaatgagcctaacaggaatttttgacatgaacatgcaaatctggaagatcctgaggtatgatgatacgagatcgagggtacgcgcatgcgaatgcggaggcaagcatgccaggttccagccggtgtgtgtagatgtgactgaagatctcagaccggatcatttggttattgcccgcactggagcagagttcggatccagtggagaagaaactgactaaggtgagtattgggaaaactttggggtgggattttcagatggacagattgagtaaaaatttgttttttctgtcttgcagctgtcatgagtggaaacgcttcttttaaggggggagtcttcagcccttatctgacagggcgtctcccatcctgggcaggagttcgtcagaatgttatgggatctactgtggatggaagacccgtccaacccgccaattcttcaacgctgacctatgctactttaagttcttcacctttggacgcagctgcagctgccgccgccgcttctgttgccgctaacactgtgcttggaatgggttactatggaagcatcatggctaattccacttcctctaataacccttctaccctgactcaggacaagttacttgtccttttggcccagctggaggctttgacccaacgtctgggtgaactttctcagcaggtggtcgagttgcgagtacaaactgagtctgctgtcggcacggcaaagtctaaataaaaaaatcccagaatcaatgaataaataaacaagcttgttgttgatttaaaatcaagtgtttttatttcatttttcgcgcacggtatgccctagaccaccgatctctatcattgagaactcggtggattttttccaggatcctatagaggtgggattgaatgtttagatacatgggcattaggccgtctttggggtggagatagctccattgaagggattcatgctccggggtagtgttgtaaatcacccagtcataacaaggtcgcagtgcatggtgttgcacaatatcttttagaagtaggctgattgccacagataagcccttggtgtaggtgtttacaaaccggttgagctgggatgggtgcattcggggtgaaattatgtgcattttggattggatttttaagttggcaatattgccgccaagatcccgtcttgggttcatgttatgaaggaccaccaagacggtgtatccggtacatttaggaaatttatcgtgcagcttggatggaaaagcgtggaaaaatttggagacacccttgtgtcctccaagattttccatgcactcatccatgataatagcaatggggccgtgggcagcggcgcgggcaaacacgttccgtgggtctgacacatcatagttatgttcctgagttaaatcatcataagccattttaatgaatttggggcggagagtaccagattggggtatgaatgttccttcgggccccggagcatagttcccctcacagatttgcatttcccaagctttcagttccgagggtggaatcatgtccacctggggggctatgaaaaacaccgtttctggggcgggggtgattaattgtgatgatagcaaatttctgagcaattgagatttgccacatccggtggggccataaatgattccgattacgggttgcaggtggtagtttagggaacggcaactgccgtcttctcgaagcaagggggccacctcgttcatcatttcccttacatgcatattttcccgcaccaaatccattaggaggcgctctcctcctagtgatagaagttcttgtagtgaggaaaagtttttcagcggtttcagaccgtcagccatgggcattttggagagagtttgctgcaaaagttctagtctgttccacagttcagtgatgtgttctatggcatctcgatccagcagacctcctcgtttcgcgggtttggacggctcctggaatagggtatgagacgatgggcgtccagcgctgccagggttcggtccttccagggtctcagtgttcgagtcagggttgtttccgtcacagtgaaggggtgtgcgcctgcttgggcgcttgccagggtgcgcttcagactcatcctgctggtcgaaaacttctgtcgcttggcgccctgtatgtcggccaagtagcagtttaccatgagttcgtagttgagcgcctcggctgcgtggcctttggcgcggagcttacctttggaagttttcttgcataccgggcagtataggcatttcagcgcatacaacttgggcgcaaggaaaacggattctggggagtatgcatctgcgccgcaggaggcgcaaacagtttcacattccaccagccaggttaaatccggttcattggggtcaaaaacaagttttccgccatattttttgatgcgtttcttacctttggtctccatgagttcgtgtcctcgttgagtgacaaacaggctgtccgtgtccccgtagactgattttacaggcctcttctccagtggagtgcctcggtcttcttcgtacaggaactctgaccactctgatacaaaggcgcgcgtccaggccagcacaaaggaggctatgtgggaggggtagcgatcgttgtcaaccagggggtccaccttttccaaagtatgcaaacacatgtcaccctcttcaacatccaggaatgtgattggcttgtaggtgtatttcacgtgacctggggtccccgctgggggggtataaaagggggcggttctttgctcttcctcactgtcttccggatcgctgtccaggaacgtcagctgttggggtaggtattccctctcgaaggcgggcatgacctctgcactcaggttgtcagtttctaagaacgaggaggatttgatattgacagtgccggttgagatgcctttcatgaggttttcgtccatctggtcagaaaacacaatttttttattgtcaagtttggtggcaaatgatccatacagggcgttggataaaagtttggcaatggatcgcatggtttggttcttttccttgtccgcgcgctctttggcggcgatgttgagttggacatactcgcgtgccaggcacttccattcggggaagatagttgttaattcatctggcacgattctcacttgccaccctcgattatgcaaggtaattaaatccacactggtggccacctcgcctcgaaggggttcattggtccaacagagcctacctcctttcctagaacagaaagggggaagtgggtctagcataagttcatcgggagggtctgcatccatggtaaagattcccggaagtaaatccttatcaaaatagctgatgggagtggggtcatctaaggccatttgccattctcgagctgccagtgcgcgctcatatgggttaaggggactgccccatggcatgggatgggtgagtgcagaggcatacatgccacagatgtcatagacgtagatgggatcctcaaagatgcctatgtaggttggatagcatcgcccccctctgatacttgctcgcacatagtcatatagttcatgtgatggcgctagcagccccggacccaagttggtgcgattgggtttttctgttctgtagacgatctggcgaaagatggcgtgagaattggaagagatggtgggtctttgaaaaatgttgaaatgggcatgaggtagacctacagagtctctgacaaagtgggcataagattcttgaagcttggttaccagttcggcggtgacaagtacgtctagggcgcagtagtcaagtgtttcttgaatgatgtcataacctggttggtttttcttttcccacagttcgcggttgagaaggtattcttcgcgatccttccagtactcttctagcggaaacccgtctttgtctgcacggtaagatcctagcatgtagaactgattaactgccttgtaagggcagcagcccttctctacgggtagagagtatgcttgagcagcttttcgtagcgaagcgtgagtaagggcaaaggtgtctctgaccatgactttgaggaattggtatttgaagtcgatgtcgtcacaggctccctgttcccagagttggaagtctacccgtttcttgtaggcggggttgggcaaagcgaaagtaacatcattgaagagaatcttgccggccctgggcatgaaattgcgagtgatgcgaaaaggctgtggtacttccgctcggttattgataacctgggcagctaggacgatctcgtcgaaaccgttgatgttgtgtcctacgatgtataattctatgaaacgcggcgtgcctctgacgtgaggtagcttactgagctcatcaaaggttaggtctgtggggtcagataaggcgtagtgttcgagagcccattcgtgcaggtgaggattcgctttaaggaaggaggaccagaggtccactgccagtgctgtttgtaactggtcccggtactgacgaaaatgccgtccgactgccattttttctggggtgacgcaatagaaggtttgggggtcctgccgccagcgatcccacttgagttttatggcgaggtcataggcgatgttgacgagccgctggtctccagagagtttcatgaccagcatgaaggggattagctgcttgccaaaggaccccatccaggtgtaggtttccacatcgtaggtgagaaagagcctttctgtgcgaggatgagagccaatcgggaagaactggatctcctgccaccagttggaggaatggctgttgatgtgatggaagtagaactccctgcgacgcgccgagcattcatgcttgtgcttgtacagacggccgcagtagtcgcagcgttgcacgggttgtatctcgtgaatgagttgtacctggcttcccttgacgagaaatttcagtgggaagccgaggcctggcgattgtatctcgtgctttactatgttgtctgcatcggcctgttcatcttctgtctcgatggtggtcatgctgacgagccctcgcgggaggcaagtccagacctcggcgcggcaggggcggagctcgaggacgagagcgcgcaggctggagctgtccagggtcctgagacgctgcggactcaggttagtaggcagtgtcaggagattaacttgcatgatcttttggagggcgtgcgggaggttcagatagtacttgatctcaacgggtccgttggtggagatgtcgatggcttgcagggttccgtgtcccttgggcgctaccaccgtgcccttgtttttcattttggacggcggtggctctgttgcttcttgcatgtttagaagcggtgtcgagggcgcgcaccgggcggcaggggcggctcgggacccggcggcatggctggcagtggtacgtcggcgccgcgcgcgggtaggttctggtactgcgccctgagaagactcgcatgcgcgacgacgcggcggttgacatcctggatctgacgcctctgggtgaaagctaccggccccgtgagcttgaacctgaaagagagttcaacagaatcaatctcggtatcgttgacggcggcttgcctaaggatttcttgcacgtcaccagagttgtcctggtaggcgatctccgccatgaactgctcgatctcttcctcttgaagatctccgcggcccgctctctcgacggtggccgcgaggtcgttggagatgcgcccaatgagttgagagaatgcattcatgcccgcctcgttccagacgcggctgtagaccacggcccccacgggatctctcgcgcgcatgaccacctgggcgaggttgagctccacgtggcgggtgaagaccgcatagttgcataggcgctggaaaaggtagttgagtgtggtggcgatgtgctcggtgacgaagaaatacatgatccatcgtctcagcggcatctcgctgacatcgcccagagcttccaagcgctccatggcctcgtagaagtccacggcaaaattaaaaaactgggagtttcgcgcggacacggtcaactcctcttccagaagacggataagttcggcgatggtggtgcgcacctcgcgctcgaaagcccctgggatttcttcctcaatctcttcttcttccactaacatctcttcctcttcaggtggggctgcaggaggagggggaacgcggcgacgccggcggcgcacgggcagacggtcgatgaatctttcaatgacctctccgcggcggcggcgcatggtttcagtgacggcgcggccgttctcgcgcggtcgcagagtaaaaacaccgccgcgcatctccttaaagtggtgactgggaggttctccgtttgggagggagagggcgctgattatacattttattaattggcccgtagggactgcacgcagagatctgatcgtgtcaagatccacgggatctgaaaacctttcgacgaaagcgtctaaccagtcacagtcacaaggtaggctgagtacggcttcttgtgggcgggggtggttatgtgttcggtctgggtcttctgtttcttcttcatctcgggaaggtgagacgatgctgctggtgatgaaattaaagtaggcagttctaagacggcggatggtggcgaggagcaccaggtctttgggtccggcttgctggatacgcaggcgattggccattccccaagcattatcctgacatctagcaagatctttgtagtagtcttgcatgagccgttctacgggcacttcttcctcacccgttctgccatgcatacgtgtgagtccaaatccgcgcattggttgtaccagtgccaagtcagctacgactctttcggcgaggatggcttgctgtacttgggtaagggtggcttgaaagtcatcaaaatccacaaagcggtggtaagctcctgtattaatggtgtaagcacagttggccatgactgaccagttaactgtctggtgaccagggcgcacgagctcggtgtatttaaggcgcgaataggcgcgggtgtcaaagatgtaatcgttgcaggtgcgcaccagatactggtaccctataagaaaatgcggcggtggttggcggtagagaggccatcgttctgtagctggagcgccaggggcgaggtcttccaacataaggcggtgatagccgtagatgtacctggacatccaggtgattcctgcggcggtagtagaagcccgaggaaactcgcgtacgcggttccaaatgttgcgtagcggcatgaagtagttcattgtaggcacggtttgaccagtgaggcgcgcgcagtcattgatgctctatagacacggagaaaatgaaagcgttcagcgactcgactccgtagcctggaggaacgtgaacgggttgggtcgcggtgtaccccggttcgagacttgtactcgagccggccggagccgcggctaacgtggtattggcactcccgtctcgacccagcctacaaaaatccaggatacggaatcgagtcgttttgctggtttccgaatggcagggaagtgagtcctattttttttttttgccgctcagatgcatcccgtgctgcgacagatgcgcccccaacaacagcccccctcgcagcagcagcagcagcaatcacaaaaggctgtccctgcaactactgcaactgccgccgtgagcggtgcgggacagcccgcctatgatctggacttggaagagggcgaaggactggcacgtctaggtgcgccttcacccgagcggcatccgcgagttcaactgaaaaaagattctcgcgaggcgtatgtgccccaacagaacctatttagagacagaagcggcgaggagccggaggagatgcgagcttcccgctttaacgcgggtcgtgagctgcgtcacggtttggaccgaagacgagtgttgcgggacgaggatttcgaagttgatgaaatgacagggatcagtcctgccagggcacacgtggctgcagccaaccttgtatcggcttacgagcagacagtaaaggaagagcgtaacttccaaaagtcttttaataatcatgtgcgaaccctgattgcccgcgaagaagttacccttggtttgatgcatttgtgggatttgatggaagctatcattcagaaccctactagcaaacctctgaccgcccagctgtttctggtggtgcaacacagcagagacaatgaggctttcagagaggcgctgctgaacatcaccgaacccgaggggagatggttgtatgatcttatcaacattctacagagtatcatagtgcaggagcggagcctgggcctggccgagaaggtggctgccatcaattactcggttttgagcttgggaaaatattacgctcgcaaaatctacaagactccatacgttcccatagacaaggaggtgaagatagatgggttctacatgcgcatgacgctcaaggtcttgaccctgagcgatgatcttggggtgtatcgcaatgacagaatgcatcgcgcggttagcgccagcaggaggcgcgagttaagcgacagggaactgatgcacagtttgcaaagagctctgactggagctggaaccgagggtgagaattacttcgacatgggagctgacttgcagtggcagcctagtcgcagggctctgagcgccgcgacggcaggatgtgagcttccttacatagaagaggcggatgaaggcgaggaggaagagggcgagtacttggaagactgatggcacaacccgtgttttttgctagatggaacagcaagcaccggatcccgcaatgcgggcggcgctgcagagccagccgtccggcattaactcctcggacgattggacccaggccatgcaacgtatcatggcgttgacgactcgcaaccccgaagcctttagacagcaaccccaggccaaccgtctatcggccatcatggaagctgtagtgccttcccgctctaatcccactcatgagaaggtcctggccatcgtgaacgcgttggtggagaacaaagctattcgtccagatgaggccggactggtatacaacgctctcttagaacgcgtggctcgctacaacagtagcaatgtgcaaaccaatttggaccgtatgataacagatgtacgcgaagccgtgtctcagcgcgaaaggttccagcgtgatgccaacctgggttcgctggtggcgttaaatgctttcttgagtactcagcctgctaatgtgccgcgtggtcaacaggattatactaactttttaagtgctttgagactgatggtatcagaagtacctcagagcgaagtgtatcagtccggtcctgattacttctttcagactagcagacagggcttgcagacggtaaatctgagccaagcttttaaaaaccttaaaggtttgtggggagtgcatgccccggtaggagaaagagcaaccgtgtctagcttgttaactccgaactcccgcctattattactgttggtagctcctttcaccgacagcggtagcatcgaccgtaattcctatttgggttacctactaaacctgtatcgcgaagccatagggcaaagtcaggtggacgagcagacctatcaagaaattacccaagtcagtcgcgctttgggacaggaagacactggcagtttggaagccactctgaacttcttgcttaccaatcggtctcaaaagatccctcctcaatatgctcttactgcggaggaggagaggatccttagatatgtgcagcagagcgtgggattgtttctgatgcaagagggggcaactccgactgcagcactggacatgacagcgcgaaatatggagcccagcatgtatgccagtaaccgacctttcattaacaaactgctggactacttgcacagagctgccgctatgaactctgattatttcaccaatgccatcttaaacccgcactggctgcccccacctggtttctacacgggcgaatatgacatgcccgaccctaatgacggatttctgtgggacgacgtggacagcgatgttttttcacctctttctgatcatcgcacgtggaaaaaggaaggcggcgatagaatgcattcttctgcatcgctgtccggggtcatgggtgctaccgcggctgagcccgagtctgcaagtccttttcctagtctacccttttctctacacagtgtacgtagcagcgaagtgggtagaataagtcgcccgagtttaatgggcgaagaggagtatctaaacgattccttgctcagaccggcaagagaaaaaaatttcccaaacaatggaatagaaagtttggtggataaaatgagtagatggaagacttatgctcaggatcacagagacgagcctgggatcatggggattacaagtagagcgagccgtagacgccagcgccatgacagacagaggggtcttgtgtgggacgatgaggattcggccgatgatagcagcgtgctggacttgggtgggagaggaaggggcaacccgtttgctcatttgcgccctcgcttgggtggtatgttgtaaaaaaaaataaaaaaaaaactcaccaaggccatggcgacgagcgtacgttcgttcttctttattatctgtgtctagtataatgaggcgagtcgtgctaggcggagcggtggtgtatccggagggtcctcctccttcgtacgagagcgtgatgcagcagcagcaggcgacggcggtgatgcaatccccactggaggctccctttgtgcctccgcgatacctggcacctacggagggcagaaacagcattcgttattcggaactggcacctcagtacgataccaccaggttgtatctggtggacaacaagtcggcggacattgcttctctgaactatcagaatgaccacagcaacttcttgaccacggtggtgcaaaacaatgactttacccctacggaagccagcacccagaccattaactttgatgaacgatcgcggtggggcggtcagctaaagaccatcatgcatactaacatgccaaacgtgaacgagtatatgtttagtaacaagttcaaagcgcgtgtgatggtgtccagaaaacctcccgacggtgctgcagttggggatacttatgatcacaagcaggatattttgaaatatgagtggttcgagtttactttgccagaaggcaacttttcagttactatgactattgatttgatgaacaatgccatcatagataattacttgaaagtgggtagacagaatggagtgcttgaaagtgacattggtgttaagttcgacaccaggaacttcaagctgggatgggatcccgaaaccaagttgatcatgcctggagtgtatacgtatgaagccttccatcctgacattgtcttactgcctggctgcggagtggattttaccgagagtcgtttgagcaaccttcttggtatcagaaaaaaacagccatttcaagagggttttaagattttgtatgaagatttagaaggtggtaatattccggccctcttggatgtagatgcctatgagaacagtaagaaagaacaaaaagccaaaatagaagctgctacagctgctgcagaagctaaggcaaacatagttgccagcgactctacaagggttgctaacgctggagaggtcagaggagacaattttgcgccaacacctgttccgactgcagaatcattattggccgatgtgtctgaaggaacggacgtgaaactcactattcaacctgtagaaaaagatagtaagaatagaagctataatgtgttggaagacaaaatcaacacagcctatcgcagttggtatctttcgtacaattatggcgatcccgaaaaaggagtgcgttcctggacattgctcaccacctcagatgtcacctgcggagcagagcaggtctactggtcgcttccagacatgatgaaggatcctgtcactttccgctccactagacaagtcagtaactaccctgtggtgggtgcagagcttatgcccgtcttctcaaagagcttctacaacgaacaagctgtgtactcccagcagctccgccagtccacctcgcttacgcacgtcttcaaccgctttcctgagaaccagattttaatccgtccgccggcgcccaccattaccaccgtcagtgaaaacgttcctgctctcacagatcacgggaccctgccgttgcgcagcagtatccggggagtccaacgtgtgaccgttactgacgccagacgccgcacctgtccctacgtgtacaaggcactgggcatagtcgcaccgcgcgtcctttcaagccgcactttctaaaaaaaaaaaaaatgtccattcttatctcgcccagtaataacaccggttggggtctgcgcgctccaagcaagatgtacggaggcgcacgcaaacgttctacccaacatcctgtccgtgttcgcggacattttcgcgctccatggggcgccctcaagggccgcactcgcgttcgaaccaccgtcgatgatgtaatcgatcaggtggttgccgacgcccgtaattatactcctactgcgcctacatctactgtggatgcagttattgacagtgtagtggctgacgctcgcaactatgctcgacgtaagagccggcgaaggcgcattgccagacgccaccgagctaccactgccatgcgagccgcaagagctctgctacgaagagctagacgcgtggggcgaagagccatgcttagggcggccagacgtgcagcttcgggcgccagcgccggcaggtcccgcaggcaagcagccgctgtcgcagcggcgactattgccgacatggcccaatcgcgaagaggcaatgtatactgggtgcgtgacgctgccaccggtcaacgtgtacccgtgcgcacccgtccccctcgcacttagaagatactgagcagtctccgatgttgtgtcccagcggcgaggatgtccaagcgcaaatacaaggaagaaatgctgcaggttatcgcacctgaagtctacggccaaccgttgaaggatgaaaaaaaaccccgcaaaatcaagcgggttaaaaaggacaaaaaagaagaggaagatggcgatgatgggctggcggagtttgtgcgcgagtttgccccacggcgacgcgtgcaatggcgtgggcgcaaagttcgacatgtgttgagacctggaacttcggtggtctttacacccggcgagcgttcaagcgctacttttaagcgttcctatgatgaggtgtacggggatgatgatattcttgagcaggcggctgaccgattaggcgagtttgcttatggcaagcgtagtagaataacttccaaggatgagacagtgtcgatacccttggatcatggaaatcccacccctagtcttaaaccggtcactttgcagcaagtgttacccgtaactccgcgaacaggtgttaaacgcgaaggtgaagatttgtatcccactatgcaactgatggtacccaaacgccagaagttggaggacgttttggagaaagtaaaagtggatccagatattcaacctgaggttaaagtgagacccattaagcaggtagcgcctggtctgggggtacaaactgtagacattaagattcccactgaaagtatggaagtgcaaactgaacccgcaaagcctactgccacctccactgaagtgcaaacggatccatggatgcccatgcctattacaactgacgccgccggtcccactcgaagatcccgacgaaagtacggtccagcaagtctgttgatgcccaattatgttgtacacccatctattattcctactcctggttaccgaggcactcgctactatcgcagccgaaacagtacctcccgccgtcgccgcaagacacctgcaaatcgcagtcgtcgccgtagacgcacaagcaaaccgactcccggcgccctggtgcggcaagtgtaccgcaatggtagtgcggaacctttgacactgccgcgtgcgcgttaccatccgagtatcatcacttaatcaatgttgccgctgcctccttgcagatatggccctcacttgtcgccttcgcgttcccatcactggttaccgaggaagaaactcgcgccgtagaagagggatgttgggacgcggaatgcgacgctacaggcgacggcgtgctatccgcaagcaattgcggggtggttttttaccagccttaattccaattatcgctgctgcaattggcgcgataccaggcatagcttccgtggcggttcaggcctcgcaacgacattgacattggaaaaaaacgtataaataaaaaaaaaaaaatacaatggactctgacactcctggtcctgtgactatgttttcttagagatggaagacatcaatttttcatccttggctccgcgacacggcacgaagccgtacatgggcacctggagcgacatcggcacgagccaactgaacgggggcgccttcaattggagcagtatctggagcgggcttaaaaattttggctcaaccataaaaacatacgggaacaaagcttggaacagcagtacaggacaggcgcttagaaataaacttaaagaccagaacttccaacaaaaagtagtcgatgggatagcttccggcatcaatggagtggtagatttggctaaccaggctgtgcagaaaaagataaacagtcgtttggacccgccgccagcaaccccaggtgaaatgcaagtggaggaagaaattcctccgccagaaaaacgaggcgacaagcgtccgcgtcccgatttggaagagacgctggtgacgcgcgtagatgaaccgccttcttatgaggaagcaacgaagcttggaatgcccaccactagaccgatagccccaatggccaccggggtgatgaaaccttctcagttgcatcgacccgtcaccttggatttgccccctccccctgctgctactgctgtacccgcttctaagcctgtcgctgccccgaaaccagtcgccgtagccaggtcacgtcccgggggcgctcctcgtccaaatgcgcactggcaaaatactctgaacagcatcgtgggtctaggcgtgcaaagtgtaaaacgccgtcgctgcttttaattaaatatggagtagcgcttaacttgcctatctgtgtatatgtgtcattacacgccgtcacagcagcagaggaaaaaaggaagaggtcgtgcgtcgacgctgagttactttcaagatggccaccccatcgatgctgccccaatgggcatacatgcacatcgccggacaggatgcttcggagtacctgagtccgggtctggtgcagttcgcccgcgccacagacacctacttcaatctgggaaataagtttagaaatcccaccgtagcgccgacccacgatgtgaccaccgaccgtagccagcggctcatgttgcgcttcgtgcccgttgaccgggaggacaatacatactcttacaaagtgcggtacaccctggccgtgggcgacaacagagtgctggatatggccagcacgttctttgacattaggggtgtgttggacagaggtcccagtttcaaaccctattctggtacggcttacaactccctggctcctaaaggcgctccaaatacatctcagtggattgcagaaggtgtaaaaaatacaactggtgaggaacacgtaacagaagaggaaaccaatactactacttacacttttggcaatgctcctgtaaaagctgaagctgaaattacaaaagaaggactcccagtaggtttggaagtttcagatgaagaaagtaaaccgatttatgctgataaaacatatcagccagaacctcagctgggagatgaaacttggactgaccttgatggaaaaaccgaaaagtatggaggcagggctctcaaacccgatactaagatgaaaccatgctacgggtcctttgccaaacctactaatgtgaaaggcggtcaggcaaaacaaaaaacaacggagcagccaaatcagaaagtcgaatatgatatcgacatggagttttttgatgcggcatcgcagaaaacaaacttaagtcctaaaattgtcatgtatgcagaaaatgtaaatttggaaactccagacactcatgtagtgtacaaacctggaacagaagacacaagttccgaagctaatttgggacaacaatctatgcccaacagacccaactacattggcttcagagataactttattggacttatgtactataacagtactggtaacatgggggtgctggctggtcaagcgtctcagttaaatgcagtggttgacttgcaggacagaaacacagaactttcttaccaactcttgcttgactctctgggcgacagaaccagatactttagcatgtggaatcaggctgtggacagttatgatcctgatgtacgtgttattgaaaatcatggtgtggaagatgaacttcccaactactgttttccactggacggcataggtgttccaacaaccagttacaaatcaatagttccaaatggagacaatgcgcctaattggaaggaacctgaagtaaatggaacaagtgagatcggacagggtaatttgtttgccatggaaattaaccttcaagccaatctatggcgaagtttcctttattccaatgtggctctatatctcccagactcgtacaaatacaccccgtccaatgtcactcttccagaaaacaaaaacacctacgactacatgaacgggcgggtggtgccgccatctctagtagacacctatgtgaacattggtgccaggtggtctctggatgccatggacaatgtcaacccattcaaccaccaccgtaacgctggcttgcgttaccgatccatgcttctgggtaacggacgttatgtgcctttccacatacaagtgcctcaaaaattcttcgctgttaaaaacctgctgcttctcccaggctcctacacttatgagtggaactttaggaaggatgtgaacatggttctacagagttccctcggtaacgacctgcgggtagatggcgccagcatcagtttcacgagcatcaacctctatgctacttttttccccatggctcacaacaccgcttccacccttgaagccatgctgcggaatgacaccaatgatcagtcattcaacgactacctatctgcagctaacatgctctaccccattcctgccaatgcaaccaatattcccatttccattccttctcgcaactgggcggctttcagaggctggtcatttaccagactgaaaaccaaagaaactccctctttggggtctggatttgacccctactttgtctattctggttctattccctacctggatggtaccttctacctgaaccacacttttaagaaggtttccatcatgtttgactcttcagtgagctggcctggaaatgacaggttactatctcctaacgaatttgaaataaagcgcactgtggatggcgaaggctacaacgtagcccaatgcaacatgaccaaagactggttcttggtacagatgctcgccaactacaacatcggctatcagggcttctacattccagaaggatacaaagatcgcatgtattcatttttcagaaacttccagcccatgagcaggcaggtggttgatgaggtcaattacaaagacttcaaggccgtcgccataccctaccaacacaacaactctggctttgtgggttacatggctccgaccatgcgccaaggtcaaccctatcccgctaactatccctatccactcattggaacaactgccgtaaatagtgttacgcagaaaaagttcttgtgtgacagaaccatgtggcgcataccgttctcgagcaacttcatgtctatgggggcccttacagacttgggacagaatatgctctatgccaactcagctcatgctctggacatgacctttgaggtggatcccatggatgagcccaccctgctttatcttctcttcgaagttttcgacgtggtcagagtgcatcagccacaccgcggcatcatcgaggcagtctacctgcgtacaccgttctcggccggtaacgctaccacgtaagaagcttcttgcttcttgcaaatagcagctgcaaccatggcctgcggatcccaaaacggctccagcgagcaagagctcagagccattgtccaagacctgggttgcggaccctattttttgggaacctacgataagcgcttcccggggttcatggcccccgataagctcgcctgtgccattgtaaatacggccggacgtgagacggggggagagcactggttggctttcggttggaacccacgttctaacacctgctacctttttgatccttttggattctcggatgatcgtctcaaacagatttaccagtttgaatatgagggtctcctgcgccgcagcgctcttgctaccaaggaccgctgtattacgctggaaaaatctacccagaccgtgcagggtccccgttctgccgcctgcggacttttctgctgcatgttccttcacgcctttgtgcactggcctgaccgtcccatggacggaaaccccaccatgaaattgctaactggagtgccaaacaacatgcttcattctcctaaagtccagcccaccctgtgtgacaatcaaaaagcactctaccattttcttaatacccattcgccttattttcgctcccatcgtacacacatcgaaagggccactgcgttcgaccgtatggatgttcaataatgactcatgtaaacaacgtgttcaataaacatcactttatttttttacatgtatcaaggctctgcattacttatttatttacaagtcgaatgggttctgacgagaatcagaatgacccgcaggcagtgatacgttgcggaactgatacttgggttgccacttgaattcgggaatcaccaacttgggaaccggtatatcgggcaggatgtcactccacagctttctggtcagctgcaaagctccaagcaggtcaggagccgaaatcttgaaatcacaattaggaccagtgctttgagcgcgagagttgcggtacaccggattgcagcactgaaacaccatcagcgacggatgtctcacgcttgccagcacggtgggatctgcaatcatgcccacatccagatcttcagcattggcaatgctgaacggggtcatcttgcaggtctgcctacccatggcgggcacccaattaggcttgtggttgcaatcgcagtgcagggggatcagtatcatcttggcctgatcctgtctgattcctggatacacggctctcatgaaagcatcatattgcttgaaagcctgctgggctttactaccctcggtataaaacatcccgcaggacctgctcgaaaactggttagctgcacagccggcatcattcacacagcagcgggcgtcattgttagctatttgcaccacacttctgccccagcggttttgggtgattttggttcgctcgggattctcctttaaggctcgttgtccgttctcgctggccacatccatctcgataatctgctccttctgaatcataatattgccatgcaggcacttcagcttgccctcataatcattgcagccatgaggccacaacgcacagcctgtacattcccaattatggtgggcgatctgagaaaaagaatgtatcattccctgcagaaatcttcccatcatcgtgctcagtgtcttgtgactagtgaaagttaactggatgcctcggtgctcctcgtttacgtactggtgacagatgcgcttgtattgttcgtgttgctcaggcattagtttaaaagaggttctaagttcgttatccagcctgtacttctccatcagcagacacatcacttccatgcctttctcccaagcagacaccaggggcaagctaatcggattcttaacagtgcaggcagcagctcctttagccagagggtcatctttagcgatcttctcaatgcttcttttgccatccttctcaacgatgcgcacgggcgggtagctgaaacccactgctacaagttgcgcctcttctctttcttcttcgctgtcttgactgatgtcttgcatggggatatgtttggtcttccttggcttctttttggggggtatcggaggaggaggactgtcgctccgttccggagacagggaggattgtgacgtttcgctcaccattaccaactgactgtcggtagaagaacctgaccccacacggcgacaggtgtttctcttcgggggcagaggtggaggcgattgcgaagggctgcggtccgacctggaaggcggatgactggcagaaccccttccgcgttcgggggtgtgctccctgtggcggtcgcttaactgatttccttcgcggctggccattgtgttctcctaggcagagaaacaacagacatggaaactcagccattgctgtcaacatcgccacgagtgccatcacatctcgtcctcagcgacgaggaaaaggagcagagcttaagcattccaccgcccagtcctgccaccacctctaccctagaagataaggaggtcgacgcatctcatgacatgcagaataaaaaagcgaaagagtctgagacagacatcgagcaagacccgggctatgtgacaccggtggaacacgaggaagagttgaaacgctttctagagagagaggatgaaaactgcccaaaacaacgagcagataactatcaccaagatgctggaaatagggatcagaacaccgactacctcatagggcttgacggggaagacgcgctccttaaacatctagcaagacagtcgctcatagtcaaggatgcattattggacagaactgaagtgcccatcagtgtggaagagctcagccgcgcctacgagcttaacctcttttcacctcgtactccccccaaacgtcagccaaacggcacctgcgagccaaatcctcgcttaaacttttatccagcttttgctgtgccagaagtactggctacctatcacatcttttttaaaaatcaaaaaattccagtctcctgccgcgctaatcgcacccgcgccgatgccctactcaatctgggacctggttcacgcttacctgatatagcttccttggaagaggttccaaagatcttcgagggtctgggcaataatgagactcgggccgcaaatgctctgcaaaagggagaaaatggcatggatgagcatcacagcgttctggtggaattggaaggcgataatgccagactcgcagtactcaagcgaagcatcgaggtcacacacttcgcatatcccgctgtcaacctgccccctaaagtcatgacggcggtcatggaccagttactcattaagcgcgcaagtcccctttcagaagacatgcatgacccagatgcctgtgatgagggtaaaccagtggtcagtgatgagcagctaacccgatggctgggcaccgactctcccagggatttggaagagcgtcgcaagcttatgatggccgtggtgctggttaccgtagaactagagtgtctccgacgtttctttaccgattcagaaaccttgcgcaaactcgaagagaatctgcactacacttttagacacggctttgtgcggcaggcatgcaagatatctaacgtggaactcaccaacctggtttcctacatgggtattctgcatgagaatcgcctaggacaaagcgtgctgcacagcaccctgaagggggaagcccgccgtgattacatccgcgattgtgtctatctgtacctgtgccacacgtggcaaaccggcatgggtgtatggcagcaatgtttagaagaacagaacttgaaagagcttgacaagctcttacagaaatctcttaaggttctgtggacagggttcgacgagcgcaccgtcgcttccgacctggcagacctcatcttcccagagcgtctcagggttactttgcgaaacggattgcctgactttatgagccagagcatgcttaacaattttcgctctttcatcctggaacgctccggtatcctgcccgccacctgctgcgcactgccctccgactttgtgcctctcacctaccgcgagtgccccccgccgctatggagtcactgctacctgttccgtctggccaactatctctcctaccactcggatgtgatcgaggatgtgagcggagacggcttgctggagtgtcactgccgctgcaatctgtgcacgccccaccggtccctagcttgcaacccccagttgatgagcgaaacccagataataggcacctttgaattgcaaggccccagcagccaaggcgatgggtcttctcctgggcaaagtttaaaactgaccccgggactgtggacctccgcctacttgcgcaagtttgctccggaagattaccacccctatgaaatcaagttctatgaggaccaatcacagcctccaaaggccgaactttcggcctgcgtcatcacccagggggcaattctggcccaattgcaagccatccaaaaatcccgccaagaatttctactgaaaaagggtaagggggtctaccttgacccccagaccggcgaggaactcaacacaaggttccctcaggatgtcccaacgacgagaaaacaagaagttgaaggtgcagccgccgcccccagaagatatggaggaagattgggacagtcaggcagaggaggcggaggaggacagtctggaggacagtctggaggaagacagtttggaggaggaaaacgaggaggcagaggaggtggaagaagtaaccgccgacaaacagttatcctcggctgcggagacaagcaacagcgctaccatctccgctccgagtcgaggaacccggcggcgtcccagcagtagatgggacgagaccggacgcttcccgaacccaaccagcgcttccaagaccggtaagaaggatcggcagggatacaagtcctggcgggggcataagaatgccatcatctcctgcttgcatgagtgcgggggcaacatatccttcacgcggcgctacttgctattccaccatggggtgaactttccgcgcaatgttttgcattactaccgtcacctccacagcccctactatagccagcaaatcccggcagtctcgacagataaagacagcggcggcgacctccaacagaaaaccagcagcggcagttagaaaatacacaacaagtgcagcaacaggaggattaaagattacagccaacgagccagcgcaaacccgagagttaagaaatcggatctttccaaccctgtatgccatcttccagcagagtcggggtcaagagcaggaactgaaaataaaaaaccgatctctgcgttcgctcaccagaagttgtttgtatcacaagagcgaagatcaacttcagcgcactctcgaggacgccgaggctctcttcaacaagtactgcgcgctgactcttaaagagtaggcagcgaccgcgcttattcaaaaaaggcgggaattacatcatcctcgacatgagtaaagaaattcccacgccttacatgtggagttatcaaccccaaatgggattggcggcaggcgcctcccaggactactccacccgcatgaattggctcagcgccgggccttctatgatttctcgagttaatgatatacgcgcctaccgaaaccaaatacttttggaacagtcagctcttaccaccacgccccgccaacaccttaatcccagaaattggcccgccgccctagtgtaccaggaaagtcccgctcccaccactgtattacttcctcgagacgcccaggccgaagtccaaatgactaatgcaggtgcgcagttagctggcggctccaccctatgtcgtcacaggcctcggcataatataaaacgcctgatgatcagaggccgaggtatccagctcaacgacgagtcggtgagctctccgcttggtctacgaccagacggaatctttcagattgccggctgcgggagatcttccttcacccctcgtcaggctgttctgactttggaaagttcgtcttcgcaaccccgctcgggcggaatcgggaccgttcaatttgtggaggagtttactccctctgtctacttcaaccccttctccggatctcctgggcattacccggacgagttcataccgaacttcgacgcgattagcgagtcagtggacggctacgattgatgtctggtgacgcggctgagctatctcggctgcgacatctagaccactgccgccgctttcgctgctttgcccgggaactcattgagttcatctacttcgaactccccaaggatcaccctcaaggtccggcccacggagtgcggatttctatcgaaggcaaaatagactctcgcctgcaacgaattttctcccagcggcccgtgctgatcgagcgagaccagggaaacaccacggtttccatctactgcatttgtaatcaccccggattgcatgaaagcctttgctgtcttatgtgtactgagtttaataaaaactgaattaagactctcctacggactgccgcttcttcaacccggattttacaaccagaagaacgaaacttttcctgtcgtccaggactctgttaacttcacctttcctactcacaaactagaagctcaacgactacaccgcttttccagaagcattttccctactaatactactttcaaaaccggaggtgagctccaaggtcttcctacagaaaacccttgggtggaagcgggccttgtagtgctaggaattcttgcgggtgggcttgtgattattctttgctacctatacacaccttgcttcactttcttagtggtgttgtggtattggtttaaaaaatggggcccatactagtcttgcttgttttactttcgcttttggaaccgggttctgccaattacgatccatgtctagacttcgacccagaaaactgcacacttacttttgcacccgacacaagccgcatctgtggagttcatcgcctctcttacgaacttggcccccaacgacaaaaatttacctgcatggtgggaatcaaccccatagttatcacccagcaaagtggagatactaagggttgcattcactgctcctgcgattccatcgagtgcacctacaccctgctgaagaccctatgcggcctaagagacctgctaccaatgaattaaaaaatgattaataaaaaatcacttacttgaaatcagcaataaggtctctgttgaaattttctcccagcagcacctcacttccctcttcccaactctggtattctaaaccccgttcagcggcatactttctccatactttaaaggggatgtcaaattttagctcctctcctgtacccacaatcttcatgtctttcttcccagatgaccaagagagtccggctcagtgactccttcaaccctgtctacccctatgaagatgaaagcacctcccaacacccctttataaacccagggtttatttccccaaatggcttcacacaaagcccaaacggagttcttactttaaaatgtttaaccccactaacaaccacaggcggatctctacagctaaaagtgggagggggacttacagtggatgacaccaacggttttttgaaagaaaacataagtgccaccacaccactcgttaagactggtcactctataggtttaccactaggagccggattgggaacgaatgaaaataaactttgtatcaaattaggacaaggacttacattcaattcaaacaacatttgcattgatgacaatattaacaccttatggacaggagtcaaccccaccgaagccaactgtcaaatcatgaactccagtgaatctaatgattgcaaattaattctaacactagttaaaactggagcactagtcactgcatttgtttatgttataggagtatctaacaattttaatatgctaactacacacagaaatataaattttactgcagagctgtttttcgattctactggtaatttactaactagactctcatccctcaaaactccacttaatcataaatcaggacaaaacatggctactggtgccattactaatgctaaaggtttcatgcccagcacgactgcctatcctttcaatgataattctagagaaaaagaaaactacatttacggaacttgttactacacagctagtgatcgcactgcttttcccattgacatatctgtcatgcttaaccgaagagcaataaatgacgagacatcatattgtattcgtataacttggtcctggaacacaggagatgccccagaggtgcaaacctctgctacaaccctagtcacctccccatttaccttttactacatcagagaagacgactgacaaataaagtttaacttgtttatttgaaaatcaattcacaaaatccgagtagttattttgcctcccccttcccatttaacagaatacaccaatctctccccacgcacagctttaaacatttggataccattagatatagacatggttttagattccacattccaaacagtttcagagcgagccaatctggggtcagtgatagataaaaatccatcgggatagtcttttaaagcgctttcacagtccaactgctgcggatgcgactccggagtctggatcacggtcatctggaagaagaacgatgggaatcataatccgaaaacggtatcggacgattgtgtctcatcaaacccacaagcagccgctgtctgcgtcgctccgtgcgactgctgtttatgggatcagggtccacagtgtcctgaagcatgattttaatagcccttaacatcaactttctggtgcgatgcgcgcagcaacgcattctgatttcactcaaatctttgcagtaggtacaacacattattacaatattgtttaataaaccataattaaaagcgctccagccaaaactcatatctgatataatcgcccctgcatgaccatcataccaaagtttaatataaattaaatgacgttccctcaaaaacacactacccacatacatgatctcttttggcatgtgcatattaacaatctgtctgtaccatggacaacgttggttaatcatgcaacccaatataaccttccggaaccacactgccaacaccgctcccccagccatgcattgaagtgaaccctgctgattacaatgacaatgaagaacccaattctctcgaccgtgaatcacttgagaatgaaaaatatctatagtggcacaacatagacataaatgcatgcatcttctcataatttttaactcctcaggatttagaaacatatcccagggaataggaagctcttgcagaacagtaaagctggcagaacaaggaagaccacgaacacaacttacactatgcatagtcatagtatcacaatctggcaacagcgggtggtcttcagtcatagaagctcgggtttcattttcctcacaacgtggtaactgggctctggtgtaagggtgatgtctggcgcatgatgtcgagcgtgcgcgcaaccttgtcataatggagttgcttcctgacattctcgtattttgtatagcaaaacgcggccctggcagaacacactcttcttcgccttctatcctgccgcttagcgtgttccgtgtgatagttcaagtacaaccacactcttaagttggtcaaaagaatgctggcttcagttgtaatcaaaactccatcgcatctaatcgttctgaggaaatcatccaagcaatgcaactggattgtgtttcaagcaggagaggagagggaagagacggaagaaccatgttaatttttattccaaacgatctcgcagtacttcaaattgtagatcgcgcagatggcatctctcgcccccactgtgttggtgaaaaagcacagctagatcaaaagaaatgcgattttcaaggtgctcaacggtggcttccagcaaagcctccacgcgcacatccaagaacaaaagaataccaaaagaaggagcattttctaactcctcaatcatcatattacattcctgcaccattcccagataattttcagctttccagccttgaattattcgtgtcagttcttgtggtaaatccaatccacacattacaaacaggtcccggagggcgccctccaccaccattcttaaacacaccctcataatgacaaaatatcttgctcctgtgtcacctgtagcgaattgagaatggcaacatcaattgacatgcccttggctctaagttcttctttaagttctagttgtaaaaactctctcatattatcaccaaactgcttagccagaagccccccgggaacaagagcaggggacgctacagtgcagtacaagcgcagacctccccaattggctccagcaaaaacaagattggaataagcatattgggaaccgccagtaatatcatcgaagttgctggaaatataatcaggcagagtttcttgtaaaaattgaataaaagaaaaatttgccaaaaaaacattcaaaacctctgggatgcaaatgcaataggttaccgcgctgcgctccaacattgttagttttgaattagtctgcaaaaataaaaaaaaaaacaagcgtcatatcatagtagcctgacgaacagatggataaatcagtctttccatcacaagacaagccacagggtctccagctcgaccctcgtaaaacctgtcatcatgattaaacaacagcaccgaaagttcctcgcggtgaccagcatgaataattcttgatgaagcatacaatccagacatgttagcatcagttaacgagaaaaaacagccaacatagcctttgggtataattatgcttaatcgtaagtatagcaaagccacccctcgcggatacaaagtaaaaggcacaggagaataaaaaatataattatttctctgctgctgttcaggcaacgtcgcccccggtccctctaaatacacatacaaagcctcatcagccatggcttaccagacaaagtacagcgggcacacaaagcacaagctctaaagtgactctccaacctctccacaatatatatatacacaagccctaaactgacgtaatgggagtaaagtgtaaaaaatcccgccaaacccaacacacaccccgaaactgcgtcaccagggaaaagtacagtttcacttccgcaatcccaacaggcgtaacttcctctttctcacggtacgtgatatcccactaacttgcaacgtcattttcccacggtcgcaccgccccttttagccgttaaccccacagccaatcaccacacgatccacactttttaaaatcacctcatttacatattggcaccattccatctataaggtatattatatagataga

SEQ ID NO: 13 - DNA, 572 bp, Artificial Sequence
  CMV exogenous promoter
agtaatcaattacggggtcattagttcatagcccatatatggagttccgcgttacataacttacggtaaatggcccgcctggctgaccgcccaacgacccccgcccattgacgtcaataatgacgtatgttcccatagtaacgccaatagggactttccattgacgtcaatgggtggagtatttacggtaaactgcccacttggcagtacatcaagtgtatcatatgccaagtacgccccctattgacgtcaatgacggtaaatggcccgcctggcattatgcccagtacatgaccttatgggactttcctacttggcagtacatctacgtattagtcatcgctattaccatgctgatgcggttttggcagtacatcaatgggcgtggatagcggtttgactcacggggatttccaagtctccaccccattgacgtcaatgggagtttgttttggcaccaaaatcaacgggactttccaaaatgtcgtaacaactccgccccattgacgcaaatgggcggtaggcgtgtacggtgggaggtctatataagcagagctggtttagtgaaccgt

SEQ ID NO: 14 - DNA, 505 bp, Artificial Sequence
  PGK exogenous promoter
ctaccgggtaggggaggcgcttttcccaaggcagtctggagcatgcgctttagcagccccgctgggcacttggcgctacacaagtggcctctggcctcgcacacattccacatccaccggtaggcgccaaccggctccgttctttggtggccccttcgcgccaccttctacccctcccctagtcaggaagttcccccccgccccgcagctcgcgtcatgcaggacgtgacaaatggaagtagcacgtctcactagtctcgtgcaaatggacagcaccgctgagcaatggaagcgggtaggcccttggggcagcggccaatagcagctttgctccttcgctttctgggctcagaggctgggaaggggtgggtccgggggcgggctcaggggcgggctcaggggcggggcgggcgcccgaaggtcctccggaggcccggcattccgcacgcttcaaaagcgcacgtctgccgcgctgttctcttcttcctcatctccgggcctttcg

SEQ ID NO: 15 - DNA, 367 bp, Artificial Sequence
  CBA exogenous promoter
gtcgaggtgagccccacgttctgcttcactctccccatctcccccccctccccacccccaattttgtatttatttattttttaattattttatgcagcgatgggggcggggggggggggggcgcgcgccaggcggggcggggcggggcgaggggcggggcggggcgaggcggagaggtgcggcggcagccaatcagagcggcgcgctccgaaagtttccttttatggcgaggcggcggcggcggcggccctataaaaagcgaagcgcgcggcgggcgggagtcgctgcgttgccttcgccccgtgccccgctccgcgccgcctcgcgccgcccgccccggctctgactgaccgcgttactcccacag

SEQ ID NO: 16 - DNA, 4 bp, Artificial Sequence
  Short splice acceptor (SSA)
cagg

SEQ ID NO: 17 - DNA, 16 bp, Artificial Sequence
  splice acceptor (SA)
cctttctctcttcagg

SEQ ID NO: 18 - DNA, 23 bp, Artificial Sequence
  branched splice acceptor (bSA)
tgctaatcctttctctcttcagg

SEQ ID NO: 19 - DNA, 551 bp, Artificial Sequence
  Internal Ribosome Entry sequence (IRES)
cgttactggccgaagccgcttggaataaggccggtgtgcgtttgtctatatgttattttccaccatattgccgtcttttggcaatgtgagggcccggaaacctggccctgtcttcttgacgagcattcctaggggtctttcccctctcgccaaaggaatgcaaggtctgttgaatgtcgtgaaggaagcagttcctctggaagcttcttgaagacaaacaacgtctgtagcgaccctttgcaggcagcggaaccccccacctggcgacaggtgcctctgcggccaaaagccacgtgtataagatacacctgcaaaggcggcacaaccccagtgccacgttgtgagttggatagttgtggaaagagtcaaatggctcccctcaagcgtattcaacaaggggctgaaggatgcccagaaggtaccccattgtatgggatctgatctggggcctcggtgcacatgcttttcatgtgtttagtcgaggttaaaaaacgtctaggccccccgaaccacggggacgtggttttcctttgaaaaacacgatgataata

SEQ ID NO: 20 - DNA, 192 bp, Artificial Sequence
  polyadenylation sequence
cagacatgataagatacattgatgagtttggacaaaccacaactagaatgcagtgaaaaaaatgctttatttgtgaaatttgtgatgctattgctttatttgtaaccattataagctgcaataaacaagttaacaacaacaattgcattcattttatgtttcaggttcagggggaggtgtgggaggtttttt

SEQ ID NO: 21 - protein, 19 aa, Artificial Sequence
  Leader sequence
MGWSCIILFLVATATGVHS

SEQ ID NO: 22 - protein, 19 aa, Artificial Sequence
  Leader sequence
MDWTWRVFCLLAVAPGAHS

SEQ ID NO: 23 - protein, 6 aa, Artificial Sequence
  Histidine tag
HHHHHH

SEQ ID NO: 24 - protein, 14 aa, Artificial Sequence
  V5 tag
GKPIPNPLLGLDST

SEQ ID NO: 25 - protein, 22 aa, Artificial Sequence
  P2A peptide
GSGATNFSLLKQAGDVEENPGP

SEQ ID NO: 26 - protein, 21 aa, Artificial Sequence
  F2A peptide
GSGEGRGSLLTCGDVEENPGP

SEQ ID NO: 27 - protein, 23 aa, Artificial Sequence
  E2A peptide
GSGQCTNYALLKLAGDVESNPGP

SEQ ID NO: 28 - protein, 25 aa, Artificial Sequence
  T2A peptide
GSGVKQTLNFDLLKLAGDVESNPGP

SEQ ID NO: 29 - protein, 123 aa, Artificial Sequence [sequence omitted]

SEQ ID NO: 30 - protein, 118 aa, Artificial Sequence
  anti-PD-L1 antibody VH chain amino acid sequence
EVQLVESGGGLVQPGGSLRLSCAASGFTFSDSWIHWVRQAPGKGLEWVAWISPYGGSTYYADSVKGRFTISADTSKNTAYLQMNSLRAEDTAVYYCARRHWPGGFDYWGQGTLVTVSA

SEQ ID NO: 31 - protein, 108 aa, Artificial Sequence
  anti-VEGF ab VL chain amino acid sequence
DIQMTQSPSSLSASVGDRVTITCSASQDISNYLNWYQQKPGKAPKVLIYFTSSLHSGVPSRFSGSGSGTDFTLTISSLQPEDFATYYCQQYSTVPWTFGQGTKVEIKR

SEQ ID NO: 32 - protein, 108 aa, Artificial Sequence
  anti-PD-L1 antibody VL chain amino acid sequence
DIQMTQSPSSLSASVGDRVTITCRASQDVSTAVAWYQQKPGKAPKLLIYSASFLYSGVPSRFSGSGSGTDFTLTISSLQPEDFATYYCQQYLYHPATFGQGTKVEIKR

SEQ ID NO: 33 - protein, 330 aa, Artificial Sequence
  human IgG1 constant heavy chain amino acid sequence
ASTKGPSVFPLAPSSKSTSGGTAALGCLVKDYFPEPVTVSWNSGALTSGVHTFPAVLQSSGLYSLSSVVTVPSSSLGTQTYICNVNHKPSNTKVDKKVEPKSCDKTHTCPPCPAPELLGGPSVFLFPPKPKDTLMISRTPEVTCVVVDVSHEDPEVKFNWYVDGVEVHNAKTKPREEQYNSTYRVVSVLTVLHQDWLNGKEYKCKVSNKALPAPIEKTISKAKGQPREPQVYTLPPSREEMTKNQVSLTCLVKGFYPSDIAVEWESNGQPENNYKTTPPVLDSDGSFFLYSKLTVDKSRWQQGNVFSCSVMHEALHNHYTQKSLSLSPGK

SEQ ID NO: 34 - protein, 330 aa, Artificial Sequence
  human IgG1 modified constant heavy chain amino acid sequence
ASTKGPSVFPLAPSSKSTSGGTAALGCLVKDYFPEPVTVSWNSGALTSGVHTFPAVLQSSGLYSLSSVVTVPSSSLGTQTYICNVNHKPSNTKVDKKVEPKSCDKTHTCPPCPAPELLGGPSVFLFPPKPKDTLMISRTPEVTCVVVAVSHEDPEVKFNWYVDGVEVHNAKTKPREEQYASTYRVVSVLTVLHQDWLNGKEYKCKVSNKALPAPIEKTISKAKGQPREPQVYTLPPSRDELTKNQVSLTCLVKGFYPSDIAVEWESNGQPENNYKTTPPVLDSDGSFFLYSKLTVDKSRWQQGNVFSCSVMHEALHNHYTQKSLSLSPGK

SEQ ID NO: 35 - protein, 105 aa, Artificial Sequence [sequence omitted]

SEQ ID NO: 36 - protein, 265 aa, Artificial Sequence
  anti-VEGF ScFv amino acid sequence
MGWSCIILFLVATATGVHSEVQLVESGGGLVQPGGSLRLSCAASGYTFTNYGMNWVRQAPGKGLEWVGWINTYTGEPTYAADFKRRFTFSLDTSKSTAYLQMNSLRAEDTAVYYCAKYPHYYGSSHWYFDVWGQGTLVTVSSGGGGSGGGGSGGGGSDIQMTQSPSSLSASVGDRVTITCSASQDISNYLNWYQQKPGKAPKVLIYFTSSLHSGVPSRFSGSGSGTDFTLTISSLQPEDFATYYCQQYSTVPWTFGQGTKVEIKR

SEQ ID NO: 37 - protein, 260 aa, Artificial Sequence
  anti-PD-L1 ScFv amino acid sequence
MGWSCIILFLVATATGVHSEVQLVESGGGLVQPGGSLRLSCAASGFTFSDSWIHWVRQAPGKGLEWVAWISPYGGSTYYADSVKGRFTISADTSKNTAYLQMNSLRAEDTAVYYCARRHWPGGFDYWGQGTLVTVSAGGGGSGGGGSGGGGSDIQMTQSPSSLSASVGDRVTITCRASQDVSTAVAWYQQKPGKAPKLLIYSASFLYSGVPSRFSGSGSGTDFTLTISSLQPEDFATYYCQQYLYHPATFGQGTKVEIKR

SEQ ID NO: 38 - protein, 239 aa, Artificial Sequence
  Green fluorescent protein amino acid sequence
MVSKGEELFTGVVPILVELDGDVNGHKFSVSGEGEGDATYGKLTLKFICTTGKLPVPWPTLVTTLTYGVQCFSRYPDHMKQHDFFKSAMPEGYVQERTIFFKDDGNYKTRAEVKFEGDTLVNRIELKGIDFKEDGNILGHKLEYNYNSHNVYIMADKQKNGIKVNFKIRHNIEDGSVQLADHYQQNTPIGDGPVLLPDNHYLSTQSALSKDPNEKRDHMVLLEFVTAAGITLGMDELYK

SEQ ID NO: 39 - protein, 550 aa, Artificial Sequence
  Luciferase amino acid sequence
MEDAKNIKKGPAPFYPLEDGTAGEQLHKAMKRYALVPGTIAFTDAHIEVDITYAEYFEMSVRLAEAMKRYGLNTNHRIVVCSENSLQFFMPVLGALFIGVAVAPANDIYNERELLNSMGISQPTVVFVSKKGLQKILNVQKKLPIIQKIIIMDSKTDYQGFQSMYTFVTSHLPPGFNEYDFVPESFDRDKTIALIMNSSGSTGLPKGVALPHRTACVRFSHARDPIFGNQIIPDTAILSVVPFHHGFGMFTTLGYLICGFRVVLMYRFEEELFLRSLQDYKIQSALLVPTLFSFFAKSTLIDKYDLSNLHEIASGGAPLSKEVGEAVAKRFHLPGIRQGYGLTETTSAILITPEGDDKPGAVGKVVPFFEAKVVDLDTGKTLGVNQRGELCVRGPMIMSGYVNNPEATNALIDKDGWLHSGDIAYWDEDEHFFIVDRLKSLIKYKGYQVAPAELESILLQHPNIFDAGVAGLPDDDAGELPAAVVVLEHGKTMTEKEIVDYVASQVTTAKKLRGGVVFVDEVPKGLTGKLDARKIREILIKAKKGGKIAV

SEQ ID NO: 40 - protein, 233 aa, Artificial Sequence
  Human Tumour necrosis factor alpha amino acid sequence
MSTESMIRDVELAEEALPKKTGGPQGSRRCLFLSLFSFLIVAGATTLFCLLHFGVIGPQREEFPRDLSLISPLAQAVRSSSRTPSDKPVAHVVANPQAEGQLQWLNRRANALLANGVELRDNQLVVPSEGLYLIYSQVLFKGQGCPSTHVLLTHTISRIAVSYQTKVNLLSAIKSPCQRETPEGAEAKPWYEPIYLGGVFQLEKGDRLSAEINRPDYLDFAESGQVYFGIIAL

SEQ ID NO: 41 - protein, 166 aa, Artificial Sequence
  Human Interferon gamma amino acid sequence
MKYTSYILAFQLCIVLGSLGCYCQDPYVKEAENLKKYFNAGHSDVADNGTLFLGILKNWKEESDRKIMQSQIVSFYFKLFKNFKDDQSIQKSVETIKEDMNVKFFNSNKKKRDDFEKLTNYSVTDLNVQRKAIHELIQVMAELSPAAKTGKRKRSQMLFRGRRASQ

SEQ ID NO: 42 - protein, 188 aa, Artificial Sequence
  Human Interferon alpha amino acid sequence
MALTFALLVALLVLSCKSSCSVGCDLPQTHSLGSRRTLMLLAQMRRISLFSCLKDRHDFGFPQEEFGNQFQKAETIPVLHEMIQQIFNLFSTKDSSAAWDETLLDKFYTELYQQLNDLEACVIQGVGVTETPLMKEDSILAVRKYFQRITLYLKEKKYSPCAWEVVRAEIMRSFSLSTNLQESLRSKE

SEQ ID NO: 43 - protein, 180 aa, Artificial Sequence
  human cancer/testis angtigen 1 (NY-ESO-1) amino acid sequence
MQAEGRGTGGSTGDADGPGGPGIPDGPGGNAGGPGEAGATGGRGPRGAGAARASGPGGGAPRGPHGGAASGLNGCCRCGARGPESRLLEFYLAMPFATPMEAELARRSLAQDAPPLPVPGVLLKEFTVSGNILTIRLTAADHRQLQLSISSCLQQLSLLMWITQCFLPVFLAQPPSGQRR

SEQ ID NO: 44 - protein, 1255 aa, Artificial Sequence
  human MUC-1 amino acid sequence
MTPGTQSPFFLLLLLTVLTVVTGSGHASSTPGGEKETSATQRSSVPSSTEKNAVSMTSSVLSSHSPGSGSSTTQGQDVTLAPATEPASGSAATWGQDVTSVPVTRPALGSTTPPAHDVTSAPDNKPAPGSTAPPAHGVTSAPDTRPAPGSTAPPAHGVTSAPDTRPAPGSTAPPAHGVTSAPDTRPAPGSTAPPAHGVTSAPDTRPAPGSTAPPAHGVTSAPDTRPAPGSTAPPAHGVTSAPDTRPAPGSTAPPAHGVTSAPDTRPAPGSTAPPAHGVTSAPDTRPAPGSTAPPAHGVTSAPDTRPAPGSTAPPAHGVTSAPDTRPAPGSTAPPAHGVTSAPDTRPAPGSTAPPAHGVTSAPDTRPAPGSTAPPAHGVTSAPDTRPAPGSTAPPAHGVTSAPDTRPAPGSTAPPAHGVTSAPDTRPAPGSTAPPAHGVTSAPDTRPAPGSTAPPAHGVTSAPDTRPAPGSTAPPAHGVTSAPDTRPAPGSTAPPAHGVTSAPDTRPAPGSTAPPAHGVTSAPDTRPAPGSTAPPAHGVTSAPDTRPAPGSTAPPAHGVTSAPDTRPAPGSTAPPAHGVTSAPDTRPAPGSTAPPAHGVTSAPDTRPAPGSTAPPAHGVTSAPDTRPAPGSTAPPAHGVTSAPDTRPAPGSTAPPAHGVTSAPDTRPAPGSTAPPAHGVTSAPDTRPAPGSTAPPAHGVTSAPDTRPAPGSTAPPAHGVTSAPDTRPAPGSTAPPAHGVTSAPDTRPAPGSTAPPAHGVTSAPDTRPAPGSTAPPAHGVTSAPDTRPAPGSTAPPAHGVTSAPDTRPAPGSTAPPAHGVTSAPDTRPAPGSTAPPAHGVTSAPDTRPAPGSTAPPAHGVTSAPDTRPAPGSTAPPAHGVTSAPDTRPAPGSTAPPAHGVTSAPDTRPAPGSTAPPAHGVTSAPDTRPAPGSTAPPAHGVTSAPDNRPALGSTAPPVHNVTSASGSASGSASTLVHNGTSARATTTPASKSTPFSIPSHHSDTPTTLASHSTKTDASSTHHSSVPPLTSSNHSTSPQLSTGVSFFFLSFHISNLQFNSSLEDPSTDYYQELQRDISEMFLQIYKQGGFLGLSNIKFRPGSVVVQLTLAFREGTINVHDVETQFNQYKTEAASRYNLTISDVSVSDVPFPFSAQSGAGVPGWGIALLVLVCVLVALAIVYLIALAVCQCRRKNYGQLDIFPARDTYHPMSEYPTYHTHGRYVPPSSTDRSPYEKVSAGNGGSSLSYTNPAVAATSANL

SEQ ID NO: 45 - DNA, 9 bp, Artificial Sequence
  A Kozak sequence
gccaccatg

SEQ ID NO: 46 - DNA, 35334 bp, Artificial Sequence
  NG-177 virus genome sequence consisting of a transgene cassette encoding an anti-PD-L1 full length antibody inserted into the region BY.
tctatctatataatataccttatagatggaatggtgccaatatgtaaatgaggtgattttaaaaagtgtggatcgtgtggtgattggctgtggggttaacggctaaaaggggcggtgcgaccgtgggaaaatgacgttttgtgggggtggagtttttttgcaagttgtcgcgggaaatgtgacgcataaaaaggcttttttctcacggaactacttagttttcccacggtatttaacaggaaatgaggtagttttgaccggatgcaagtgaaaattgttgattttcgcgcgaaaactgaatgaggaagtgtttttctgaataatgtggtatttatggcagggtggagtatttgttcagggccaggtagactttgacccattacgtggaggtttcgattaccgtgttttttacctgaatttccgcgtaccgtgtcaaagtcttctgtttttacgtaggtgtcagctgatcgctagggtatttatacctcagggtttgtgtcaagaggccactcttgagtgccagcgagaagagttttctcctctgcgccggcagtttaataataaaaaaatgagagatttgcgatttctgcctcaggaaataatctctgctgagactggaaatgaaatattggagcttgtggtgcacgccctgatgggagacgatccggagccacctgtgcagctttttgagcctcctacgcttcaggaactgtatgatttagaggtagagggatcggaggattctaatgaggaagctgtaaatggcttttttaccgattctatgcttttagctgctaatgaagggttagaattagatccgcctttggacacttttgatactccaggggtaattgtggaaagcggtacaggtgtaagaaaattacctgatttgagttccgtggactgtgatttgcactgctatgaagacgggtttcctccgagtgatgaggaggaccatgaaaaggagcagtccatgcagactgcagcgggtgagggagtgaaggctgccaatgttggttttcagttggattgcccggagcttcctggacatggctgtaagtcttgtgaatttcacaggaaaaatactggagtaaaggaactgttatgttcgctttgttatatgagaacgcactgccactttatttacagtaagtgtgtttaagttaaaatttaaaggaatatgctgtttttcacatgtatattgagtgtgagttttgtgcttcttattataggtcctgtgtctgatgctgatgaatcaccatctcctgattctactacctcacctcctgagattcaagcacctgttcctgtggacgtgcgcaagcccattcctgtgaagcttaagcctgggaaacgtccagcagtggaaaaacttgaggacttgttacagggtggggacggacctttggacttgagtacacggaaacgtccaagacaataagtgttccatatccgtgtttacttaaggtgacgtcaatatttgtgtgacagtgcaatgtaataaaaatatgttaactgttcactggtttttattgctttttgggcggggactcaggtatataagtagaagcagacctgtgtggttagctcataggagctggctttcatccatggaggtttgggccattttggaagaccttaggaagactaggcaactgttagagaacgcttcggacggagtctccggtttttggagattctggttcgctagtgaattagctagggtagtttttaggataaaacaggactataaacaagaatttgaaaagttgttggtagattgcccaggactttttgaagctcttaatttgggccatcaggttcactttaaagaaaaagttttatcagttttagacttttcaaccccaggtagaactgctgctgctgtggcttttcttacttttatattagataaatggatcccgcagactcatttcagcaggggatacgttttggatttcatagccacagcattgtggagaacatggaaggttcgcaagatgaggacaatcttaggttactggccagtgcagcctttgggtgtagcgggaatcctgaggcatccaccggtcatgccagcggttctggaggaggaacagcaagaggacaacccgagagccggcctggaccctccagtggaggaggcggagtagctgacttgtctcctgaactgcaacgggtgcttactggatctacgtccactggacgggataggggcgttaagagggagagggcatctagtggtactgatgctagatctgagttggctttaagtttaatgagtcgcagacgtcctgaaaccatttggtggcatgaggttcagaaagagggaagggatgaagtttctgtattgcaggagaaatattcactggaacaggtgaaaacatgttggttggagcctgaggatgattgggaggtggccattaaaaattatgccaagatagctttgaggcctgataaacagtataagattactagacggattaatatccggaatgcttgttacatatctggaaatggggctgaggtggtaatagatactcaagacaaggcagttattagatgctgcatgatggatatgtggcctggggtagtcggtatggaagcagtaacttttgtaaatgttaagtttaggggagatggttataatggaatagtgtttatggccaataccaaacttatattgcatggttgtagcttttttggtttcaacaatacctgtgtagatgcctggggacaggttagtgtacggggatgtagtttctatgcgtgttggattgccacagctggcagaaccaagagtcaattgtctctgaagaaatgcatatttcaaagatgtaacctgggcattctgaatgaaggcgaagcaagggtccgccactgcgcttctacagatactggatgttttattttgattaagggaaatgccagcgtaaagcataacatgatttgcggtgcttccgatgagaggccttatcaaatgctcacttgtgctggtgggcattgtaatatgctggctactgtgcatattgtttcccatcaacgcaaaaaatggcctgtttttgatcacaatgtgatgacgaagtgtaccatgcatgcaggtgggcgtagaggaatgtttatgccttaccagtgtaacatgaatcatgtgaaagtgttgttggaaccagatgccttttccagaatgagcctaacaggaatttttgacatgaacatgcaaatctggaagatcctgaggtatgatgatacgagatcgagggtacgcgcatgcgaatgcggaggcaagcatgccaggttccagccggtgtgtgtagatgtgactgaagatctcagaccggatcatttggttattgcccgcactggagcagagttcggatccagtggagaagaaactgactaaggtgagtattgggaaaactttggggtgggattttcagatggacagattgagtaaaaatttgttttttctgtcttgcagctgtcatgagtggaaacgcttcttttaaggggggagtcttcagcccttatctgacagggcgtctcccatcctgggcaggagttcgtcagaatgttatgggatctactgtggatggaagacccgtccaacccgccaattcttcaacgctgacctatgctactttaagttcttcacctttggacgcagctgcagctgccgccgccgcttctgttgccgctaacactgtgcttggaatgggttactatggaagcatcatggctaattccacttcctctaataacccttctaccctgactcaggacaagttacttgtccttttggcccagctggaggctttgacccaacgtctgggtgaactttctcagcaggtggtcgagttgcgagtacaaactgagtctgctgtcggcacggcaaagtctaaataaaaaaatcccagaatcaatgaataaataaacaagcttgttgttgatttaaaatcaagtgtttttatttcatttttcgcgcacggtatgccctagaccaccgatctctatcattgagaactcggtggattttttccaggatcctatagaggtgggattgaatgtttagatacatgggcattaggccgtctttggggtggagatagctccattgaagggattcatgctccggggtagtgttgtaaatcacccagtcataacaaggtcgcagtgcatggtgttgcacaatatcttttagaagtaggctgattgccacagataagcccttggtgtaggtgtttacaaaccggttgagctgggatgggtgcattcggggtgaaattatgtgcattttggattggatttttaagttggcaatattgccgccaagatcccgtcttgggttcatgttatgaaggaccaccaagacggtgtatccggtacatttaggaaatttatcgtgcagcttggatggaaaagcgtggaaaaatttggagacacccttgtgtcctccaagattttccatgcactcatccatgataatagcaatggggccgtgggcagcggcgcgggcaaacacgttccgtgggtctgacacatcatagttatgttcctgagttaaatcatcataagccattttaatgaatttggggcggagagtaccagattggggtatgaatgttccttcgggccccggagcatagttcccctcacagatttgcatttcccaagctttcagttccgagggtggaatcatgtccacctggggggctatgaaaaacaccgtttctggggcgggggtgattaattgtgatgatagcaaatttctgagcaattgagatttgccacatccggtggggccataaatgattccgattacgggttgcaggtggtagtttagggaacggcaactgccgtcttctcgaagcaagggggccacctcgttcatcatttcccttacatgcatattttcccgcaccaaatccattaggaggcgctctcctcctagtgatagaagttcttgtagtgaggaaaagtttttcagcggtttcagaccgtcagccatgggcattttggagagagtttgctgcaaaagttctagtctgttccacagttcagtgatgtgttctatggcatctcgatccagcagacctcctcgtttcgcgggtttggacggctcctggaatagggtatgagacgatgggcgtccagcgctgccagggttcggtccttccagggtctcagtgttcgagtcagggttgtttccgtcacagtgaaggggtgtgcgcctgcttgggcgcttgccagggtgcgcttcagactcatcctgctggtcgaaaacttctgtcgcttggcgccctgtatgtcggccaagtagcagtttaccatgagttcgtagttgagcgcctcggctgcgtggcctttggcgcggagcttacctttggaagttttcttgcataccgggcagtataggcatttcagcgcatacaacttgggcgcaaggaaaacggattctggggagtatgcatctgcgccgcaggaggcgcaaacagtttcacattccaccagccaggttaaatccggttcattggggtcaaaaacaagttttccgccatattttttgatgcgtttcttacctttggtctccatgagttcgtgtcctcgttgagtgacaaacaggctgtccgtgtccccgtagactgattttacaggcctcttctccagtggagtgcctcggtcttcttcgtacaggaactctgaccactctgatacaaaggcgcgcgtccaggccagcacaaaggaggctatgtgggaggggtagcgatcgttgtcaaccagggggtccaccttttccaaagtatgcaaacacatgtcaccctcttcaacatccaggaatgtgattggcttgtaggtgtatttcacgtgacctggggtccccgctgggggggtataaaagggggcggttctttgctcttcctcactgtcttccggatcgctgtccaggaacgtcagctgttggggtaggtattccctctcgaaggcgggcatgacctctgcactcaggttgtcagtttctaagaacgaggaggatttgatattgacagtgccggttgagatgcctttcatgaggttttcgtccatctggtcagaaaacacaatttttttattgtcaagtttggtggcaaatgatccatacagggcgttggataaaagtttggcaatggatcgcatggtttggttcttttccttgtccgcgcgctctttggcggcgatgttgagttggacatactcgcgtgccaggcacttccattcggggaagatagttgttaattcatctggcacgattctcacttgccaccctcgattatgcaaggtaattaaatccacactggtggccacctcgcctcgaaggggttcattggtccaacagagcctacctcctttcctagaacagaaagggggaagtgggtctagcataagttcatcgggagggtctgcatccatggtaaagattcccggaagtaaatccttatcaaaatagctgatgggagtggggtcatctaaggccatttgccattctcgagctgccagtgcgcgctcatatgggttaaggggactgccccatggcatgggatgggtgagtgcagaggcatacatgccacagatgtcatagacgtagatgggatcctcaaagatgcctatgtaggttggatagcatcgcccccctctgatacttgctcgcacatagtcatatagttcatgtgatggcgctagcagccccggacccaagttggtgcgattgggtttttctgttctgtagacgatctggcgaaagatggcgtgagaattggaagagatggtgggtctttgaaaaatgttgaaatgggcatgaggtagacctacagagtctctgacaaagtgggcataagattcttgaagcttggttaccagttcggcggtgacaagtacgtctagggcgcagtagtcaagtgtttcttgaatgatgtcataacctggttggtttttcttttcccacagttcgcggttgagaaggtattcttcgcgatccttccagtactcttctagcggaaacccgtctttgtctgcacggtaagatcctagcatgtagaactgattaactgccttgtaagggcagcagcccttctctacgggtagagagtatgcttgagcagcttttcgtagcgaagcgtgagtaagggcaaaggtgtctctgaccatgactttgaggaattggtatttgaagtcgatgtcgtcacaggctccctgttcccagagttggaagtctacccgtttcttgtaggcggggttgggcaaagcgaaagtaacatcattgaagagaatcttgccggccctgggcatgaaattgcgagtgatgcgaaaaggctgtggtacttccgctcggttattgataacctgggcagctaggacgatctcgtcgaaaccgttgatgttgtgtcctacgatgtataattctatgaaacgcggcgtgcctctgacgtgaggtagcttactgagctcatcaaaggttaggtctgtggggtcagataaggcgtagtgttcgagagcccattcgtgcaggtgaggattcgctttaaggaaggaggaccagaggtccactgccagtgctgtttgtaactggtcccggtactgacgaaaatgccgtccgactgccattttttctggggtgacgcaatagaaggtttgggggtcctgccgccagcgatcccacttgagttttatggcgaggtcataggcgatgttgacgagccgctggtctccagagagtttcatgaccagcatgaaggggattagctgcttgccaaaggaccccatccaggtgtaggtttccacatcgtaggtgagaaagagcctttctgtgcgaggatgagagccaatcgggaagaactggatctcctgccaccagttggaggaatggctgttgatgtgatggaagtagaactccctgcgacgcgccgagcattcatgcttgtgcttgtacagacggccgcagtagtcgcagcgttgcacgggttgtatctcgtgaatgagttgtacctggcttcccttgacgagaaatttcagtgggaagccgaggcctggcgattgtatctcgtgctttactatgttgtctgcatcggcctgttcatcttctgtctcgatggtggtcatgctgacgagccctcgcgggaggcaagtccagacctcggcgcggcaggggcggagctcgaggacgagagcgcgcaggctggagctgtccagggtcctgagacgctgcggactcaggttagtaggcagtgtcaggagattaacttgcatgatcttttggagggcgtgcgggaggttcagatagtacttgatctcaacgggtccgttggtggagatgtcgatggcttgcagggttccgtgtcccttgggcgctaccaccgtgcccttgtttttcattttggacggcggtggctctgttgcttcttgcatgtttagaagcggtgtcgagggcgcgcaccgggcggcaggggcggctcgggacccggcggcatggctggcagtggtacgtcggcgccgcgcgcgggtaggttctggtactgcgccctgagaagactcgcatgcgcgacgacgcggcggttgacatcctggatctgacgcctctgggtgaaagctaccggccccgtgagcttgaacctgaaagagagttcaacagaatcaatctcggtatcgttgacggcggcttgcctaaggatttcttgcacgtcaccagagttgtcctggtaggcgatctccgccatgaactgctcgatctcttcctcttgaagatctccgcggcccgctctctcgacggtggccgcgaggtcgttggagatgcgcccaatgagttgagagaatgcattcatgcccgcctcgttccagacgcggctgtagaccacggcccccacgggatctctcgcgcgcatgaccacctgggcgaggttgagctccacgtggcgggtgaagaccgcatagttgcataggcgctggaaaaggtagttgagtgtggtggcgatgtgctcggtgacgaagaaatacatgatccatcgtctcagcggcatctcgctgacatcgcccagagcttccaagcgctccatggcctcgtagaagtccacggcaaaattaaaaaactgggagtttcgcgcggacacggtcaactcctcttccagaagacggataagttcggcgatggtggtgcgcacctcgcgctcgaaagcccctgggatttcttcctcaatctcttcttcttccactaacatctcttcctcttcaggtggggctgcaggaggagggggaacgcggcgacgccggcggcgcacgggcagacggtcgatgaatctttcaatgacctctccgcggcggcggcgcatggtttcagtgacggcgcggccgttctcgcgcggtcgcagagtaaaaacaccgccgcgcatctccttaaagtggtgactgggaggttctccgtttgggagggagagggcgctgattatacattttattaattggcccgtagggactgcacgcagagatctgatcgtgtcaagatccacgggatctgaaaacctttcgacgaaagcgtctaaccagtcacagtcacaaggtaggctgagtacggcttcttgtgggcgggggtggttatgtgttcggtctgggtcttctgtttcttcttcatctcgggaaggtgagacgatgctgctggtgatgaaattaaagtaggcagttctaagacggcggatggtggcgaggagcaccaggtctttgggtccggcttgctggatacgcaggcgattggccattccccaagcattatcctgacatctagcaagatctttgtagtagtcttgcatgagccgttctacgggcacttcttcctcacccgttctgccatgcatacgtgtgagtccaaatccgcgcattggttgtaccagtgccaagtcagctacgactctttcggcgaggatggcttgctgtacttgggtaagggtggcttgaaagtcatcaaaatccacaaagcggtggtaagctcctgtattaatggtgtaagcacagttggccatgactgaccagttaactgtctggtgaccagggcgcacgagctcggtgtatttaaggcgcgaataggcgcgggtgtcaaagatgtaatcgttgcaggtgcgcaccagatactggtaccctataagaaaatgcggcggtggttggcggtagagaggccatcgttctgtagctggagcgccaggggcgaggtcttccaacataaggcggtgatagccgtagatgtacctggacatccaggtgattcctgcggcggtagtagaagcccgaggaaactcgcgtacgcggttccaaatgttgcgtagcggcatgaagtagttcattgtaggcacggtttgaccagtgaggcgcgcgcagtcattgatgctctatagacacggagaaaatgaaagcgttcagcgactcgactccgtagcctggaggaacgtgaacgggttgggtcgcggtgtaccccggttcgagacttgtactcgagccggccggagccgcggctaacgtggtattggcactcccgtctcgacccagcctacaaaaatccaggatacggaatcgagtcgttttgctggtttccgaatggcagggaagtgagtcctattttttttttttgccgctcagatgcatcccgtgctgcgacagatgcgcccccaacaacagcccccctcgcagcagcagcagcagcaatcacaaaaggctgtccctgcaactactgcaactgccgccgtgagcggtgcgggacagcccgcctatgatctggacttggaagagggcgaaggactggcacgtctaggtgcgccttcacccgagcggcatccgcgagttcaactgaaaaaagattctcgcgaggcgtatgtgccccaacagaacctatttagagacagaagcggcgaggagccggaggagatgcgagcttcccgctttaacgcgggtcgtgagctgcgtcacggtttggaccgaagacgagtgttgcgggacgaggatttcgaagttgatgaaatgacagggatcagtcctgccagggcacacgtggctgcagccaaccttgtatcggcttacgagcagacagtaaaggaagagcgtaacttccaaaagtcttttaataatcatgtgcgaaccctgattgcccgcgaagaagttacccttggtttgatgcatttgtgggatttgatggaagctatcattcagaaccctactagcaaacctctgaccgcccagctgtttctggtggtgcaacacagcagagacaatgaggctttcagagaggcgctgctgaacatcaccgaacccgaggggagatggttgtatgatcttatcaacattctacagagtatcatagtgcaggagcggagcctgggcctggccgagaaggtggctgccatcaattactcggttttgagcttgggaaaatattacgctcgcaaaatctacaagactccatacgttcccatagacaaggaggtgaagatagatgggttctacatgcgcatgacgctcaaggtcttgaccctgagcgatgatcttggggtgtatcgcaatgacagaatgcatcgcgcggttagcgccagcaggaggcgcgagttaagcgacagggaactgatgcacagtttgcaaagagctctgactggagctggaaccgagggtgagaattacttcgacatgggagctgacttgcagtggcagcctagtcgcagggctctgagcgccgcgacggcaggatgtgagcttccttacatagaagaggcggatgaaggcgaggaggaagagggcgagtacttggaagactgatggcacaacccgtgttttttgctagatggaacagcaagcaccggatcccgcaatgcgggcggcgctgcagagccagccgtccggcattaactcctcggacgattggacccaggccatgcaacgtatcatggcgttgacgactcgcaaccccgaagcctttagacagcaaccccaggccaaccgtctatcggccatcatggaagctgtagtgccttcccgctctaatcccactcatgagaaggtcctggccatcgtgaacgcgttggtggagaacaaagctattcgtccagatgaggccggactggtatacaacgctctcttagaacgcgtggctcgctacaacagtagcaatgtgcaaaccaatttggaccgtatgataacagatgtacgcgaagccgtgtctcagcgcgaaaggttccagcgtgatgccaacctgggttcgctggtggcgttaaatgctttcttgagtactcagcctgctaatgtgccgcgtggtcaacaggattatactaactttttaagtgctttgagactgatggtatcagaagtacctcagagcgaagtgtatcagtccggtcctgattacttctttcagactagcagacagggcttgcagacggtaaatctgagccaagcttttaaaaacctttaaaggttgtggggagtgcatgccccggtaggagaaagagcaaccgtgtctagcttgttaactccgaactcccgcctattattactgttggtagctcctttcaccgacagcggtagcatcgaccgtaattcctatttgggttacctactaaacctgtatcgcgaagccatagggcaaagtcaggtggacgagcagacctatcaagaaattacccaagtcagtcgcgctttgggacaggaagacactggcagtttggaagccactctgaacttcttgcttaccaatcggtctcaaaagatccctcctcaatatgctcttactgcggaggaggagaggatccttagatatgtgcagcagagcgtgggattgtttctgatgcaagagggggcaactccgactgcagcactggacatgacagcgcgaaatatggagcccagcatgtatgccagtaaccgacctttcattaacaaactgctggactacttgcacagagctgccgctatgaactctgattatttcaccaatgccatcttaaacccgcactggctgcccccacctggtttctacacgggcgaatatgacatgcccgaccctaatgacggatttctgtgggacgacgtggacagcgatgttttttcacctctttctgatcatcgcacgtggaaaaaggaaggcggcgatagaatgcattcttctgcatcgctgtccggggtcatgggtgctaccgcggctgagcccgagtctgcaagtccttttcctagtctacccttttctctacacagtgtacgtagcagcgaagtgggtagaataagtcgcccgagtttaatgggcgaagaggagtatctaaacgattccttgctcagaccggcaagagaaaaaaatttcccaaacaatggaatagaaagtttggtggataaaatgagtagatggaagacttatgctcaggatcacagagacgagcctgggatcatggggattacaagtagagcgagccgtagacgccagcgccatgacagacagaggggtcttgtgtgggacgatgaggattcggccgatgatagcagcgtgctggacttgggtgggagaggaaggggcaacccgtttgctcatttgcgccctcgcttgggtggtatgttgtaaaaaaaaataaaaaaaaaactcaccaaggccatggcgacgagcgtacgttcgttcttctttattatctgtgtctagtataatgaggcgagtcgtgctaggcggagcggtggtgtatccggagggtcctcctccttcgtacgagagcgtgatgcagcagcagcaggcgacggcggtgatgcaatccccactggaggctccctttgtgcctccgcgatacctggcacctacggagggcagaaacagcattcgttattcggaactggcacctcagtacgataccaccaggttgtatctggtggacaacaagtcggcggacattgcttctctgaactatcagaatgaccacagcaacttcttgaccacggtggtgcaaaacaatgactttacccctacggaagccagcacccagaccattaactttgatgaacgatcgcggtggggcggtcagctaaagaccatcatgcatactaacatgccaaacgtgaacgagtatatgtttagtaacaagttcaaagcgcgtgtgatggtgtccagaaaacctcccgacggtgctgcagttggggatacttatgatcacaagcaggatattttgaaatatgagtggttcgagtttactttgccagaaggcaacttttcagttactatgactattgatttgatgaacaatgccatcatagataattacttgaaagtgggtagacagaatggagtgcttgaaagtgacattggtgttaagttcgacaccaggaacttcaagctgggatgggatcccgaaaccaagttgatcatgcctggagtgtatacgtatgaagccttccatcctgacattgtcttactgcctggctgcggagtggattttaccgagagtcgtttgagcaaccttcttggtatcagaaaaaaacagccatttcaagagggttttaagattttgtatgaagatttagaaggtggtaatattccggccctcttggatgtagatgcctatgagaacagtaagaaagaacaaaaagccaaaatagaagctgctacagctgctgcagaagctaaggcaaacatagttgccagcgactctacaagggttgctaacgctggagaggtcagaggagacaattttgcgccaacacctgttccgactgcagaatcattattggccgatgtgtctgaaggaacggacgtgaaactcactattcaacctgtagaaaaagatagtaagaatagaagctataatgtgttggaagacaaaatcaacacagcctatcgcagttggtatctttcgtacaattatggcgatcccgaaaaaggagtgcgttcctggacattgctcaccacctcagatgtcacctgcggagcagagcaggtctactggtcgcttccagacatgatgaaggatcctgtcactttccgctccactagacaagtcagtaactaccctgtggtgggtgcagagcttatgcccgtcttctcaaagagcttctacaacgaacaagctgtgtactcccagcagctccgccagtccacctcgcttacgcacgtcttcaaccgctttcctgagaaccagattttaatccgtccgccggcgcccaccattaccaccgtcagtgaaaacgttcctgctctcacagatcacgggaccctgccgttgcgcagcagtatccggggagtccaacgtgtgaccgttactgacgccagacgccgcacctgtccctacgtgtacaaggcactgggcatagtcgcaccgcgcgtcctttcaagccgcactttctaaaaaaaaaaaaaatgtccattcttatctcgcccagtaataacaccggttggggtctgcgcgctccaagcaagatgtacggaggcgcacgcaaacgttctacccaacatcctgtccgtgttcgcggacattttcgcgctccatggggcgccctcaagggccgcactcgcgttcgaaccaccgtcgatgatgtaatcgatcaggtggttgccgacgcccgtaattatactcctactgcgcctacatctactgtggatgcagttattgacagtgtagtggctgacgctcgcaactatgctcgacgtaagagccggcgaaggcgcattgccagacgccaccgagctaccactgccatgcgagccgcaagagctctgctacgaagagctagacgcgtggggcgaagagccatgcttagggcggccagacgtgcagcttcgggcgccagcgccggcaggtcccgcaggcaagcagccgctgtcgcagcggcgactattgccgacatggcccaatcgcgaagaggcaatgtatactgggtgcgtgacgctgccaccggtcaacgtgtacccgtgcgcacccgtccccctcgcacttagaagatactgagcagtctccgatgttgtgtcccagcggcgaggatgtccaagcgcaaatacaaggaagaaatgctgcaggttatcgcacctgaagtctacggccaaccgttgaaggatgaaaaaaaaccccgcaaaatcaagcgggttaaaaaggacaaaaaagaagaggaagatggcgatgatgggctggcggagtttgtgcgcgagtttgccccacggcgacgcgtgcaatggcgtgggcgcaaagttcgacatgtgttgagacctggaacttcggtggtctttacacccggcgagcgttcaagcgctacttttaagcgttcctatgatgaggtgtacggggatgatgatattcttgagcaggcggctgaccgattaggcgagtttgcttatggcaagcgtagtagaataacttccaaggatgagacagtgtcgatacccttggatcatggaaatcccacccctagtcttaaaccggtcactttgcagcaagtgttacccgtaactccgcgaacaggtgttaaacgcgaaggtgaagatttgtatcccactatgcaactgatggtacccaaacgccagaagttggaggacgttttggagaaagtaaaagtggatccagatattcaacctgaggttaaagtgagacccattaagcaggtagcgcctggtctgggggtacaaactgtagacattaagattcccactgaaagtatggaagtgcaaactgaacccgcaaagcctactgccacctccactgaagtgcaaacggatccatggatgcccatgcctattacaactgacgccgccggtcccactcgaagatcccgacgaaagtacggtccagcaagtctgttgatgcccaattatgttgtacacccatctattattcctactcctggttaccgaggcactcgctactatcgcagccgaaacagtacctcccgccgtcgccgcaagacacctgcaaatcgcagtcgtcgccgtagacgcacaagcaaaccgactcccggcgccctggtgcggcaagtgtaccgcaatggtagtgcggaacctttgacactgccgcgtgcgcgttaccatccgagtatcatcacttaatcaatgttgccgctgcctccttgcagatatggccctcacttgtcgccttcgcgttcccatcactggttaccgaggaagaaactcgcgccgtagaagagggatgttgggacgcggaatgcgacgctacaggcgacggcgtgctatccgcaagcaattgcggggtggttttttaccagccttaattccaattatcgctgctgcaattggcgcgataccaggcatagcttccgtggcggttcaggcctcgcaacgacattgacattggaaaaaaacgtataaataaaaaaaaaaaaatacaatggactctgacactcctggtcctgtgactatgttttcttagagatggaagacatcaatttttcatccttggctccgcgacacggcacgaagccgtacatgggcacctggagcgacatcggcacgagccaactgaacgggggcgccttcaattggagcagtatctggagcgggcttaaaaattttggctcaaccataaaaacatacgggaacaaagcttggaacagcagtacaggacaggcgcttagaaataaacttaaagaccagaacttccaacaaaaagtagtcgatgggatagcttccggcatcaatggagtggtagatttggctaaccaggctgtgcagaaaaagataaacagtcgtttggacccgccgccagcaaccccaggtgaaatgcaagtggaggaagaaattcctccgccagaaaaacgaggcgacaagcgtccgcgtcccgatttggaagagacgctggtgacgcgcgtagatgaaccgccttcttatgaggaagcaacgaagcttggaatgcccaccactagaccgatagccccaatggccaccggggtgatgaaaccttctcagttgcatcgacccgtcaccttggatttgccccctccccctgctgctactgctgtacccgcttctaagcctgtcgctgccccgaaaccagtcgccgtagccaggtcacgtcccgggggcgctcctcgtccaaatgcgcactggcaaaatactctgaacagcatcgtgggtctaggcgtgcaaagtgtaaaacgccgtcgctgcttttaattaaatatggagtagcgcttaacttgcctatctgtgtatatgtgtcattacacgccgtcacagcagcagaggaaaaaaggaagaggtcgtgcgtcgacgctgagttactttcaagatggccaccccatcgatgctgccccaatgggcatacatgcacatcgccggacaggatgcttcggagtacctgagtccgggtctggtgcagttcgcccgcgccacagacacctacttcaatctgggaaataagtttagaaatcccaccgtagcgccgacccacgatgtgaccaccgaccgtagccagcggctcatgttgcgcttcgtgcccgttgaccgggaggacaatacatactcttacaaagtgcggtacaccctggccgtgggcgacaacagagtgctggatatggccagcacgttctttgacattaggggtgtgttggacagaggtcccagtttcaaaccctattctggtacggcttacaactccctggctcctaaaggcgctccaaatacatctcagtggattgcagaaggtgtaaaaaatacaactggtgaggaacacgtaacagaagaggaaaccaatactactacttacacttttggcaatgctcctgtaaaagctgaagctgaaattacaaaagaaggactcccagtaggtttggaagtttcagatgaagaaagtaaaccgatttatgctgataaaacatatcagccagaacctcagctgggagatgaaacttggactgaccttgatggaaaaaccgaaaagtatggaggcagggctctcaaacccgatactaagatgaaaccatgctacgggtcctttgccaaacctactaatgtgaaaggcggtcaggcaaaacaaaaaacaacggagcagccaaatcagaaagtcgaatatgatatcgacatggagttttttgatgcggcatcgcagaaaacaaacttaagtcctaaaattgtcatgtatgcagaaaatgtaaatttggaaactccagacactcatgtagtgtacaaacctggaacagaagacacaagttccgaagctaatttgggacaacaatctatgcccaacagacccaactacattggcttcagagataactttattggacttatgtactataacagtactggtaacatgggggtgctggctggtcaagcgtctcagttaaatgcagtggttgacttgcaggacagaaacacagaactttcttaccaactcttgcttgactctctgggcgacagaaccagatactttagcatgtggaatcaggctgtggacagttatgatcctgatgtacgtgttattgaaaatcatggtgtggaagatgaacttcccaactactgttttccactggacggcataggtgttccaacaaccagttacaaatcaatagttccaaatggagacaatgcgcctaattggaaggaacctgaagtaaatggaacaagtgagatcggacagggtaatttgtttgccatggaaattaaccttcaagccaatctatggcgaagtttcctttattccaatgtggctctatatctcccagactcgtacaaatacaccccgtccaatgtcactcttccagaaaacaaaaacacctacgactacatgaacgggcgggtggtgccgccatctctagtagacacctatgtgaacattggtgccaggtggtctctggatgccatggacaatgtcaacccattcaaccaccaccgtaacgctggcttgcgttaccgatccatgcttctgggtaacggacgttatgtgcctttccacatacaagtgcctcaaaaattcttcgctgttaaaaacctgctgcttctcccaggctcctacacttatgagtggaactttaggaaggatgtgaacatggttctacagagttccctcggtaacgacctgcgggtagatggcgccagcatcagtttcacgagcatcaacctctatgctacttttttccccatggctcacaacaccgcttccacccttgaagccatgctgcggaatgacaccaatgatcagtcattcaacgactacctatctgcagctaacatgctctaccccattcctgccaatgcaaccaatattcccatttccattccttctcgcaactgggcggctttcagaggctggtcatttaccagactgaaaaccaaagaaactccctctttggggtctggatttgacccctactttgtctattctggttctattccctacctggatggtaccttctacctgaaccacacttttaagaaggtttccatcatgtttgactcttcagtgagctggcctggaaatgacaggttactatctcctaacgaatttgaaataaagcgcactgtggatggcgaaggctacaacgtagcccaatgcaacatgaccaaagactggttcttggtacagatgctcgccaactacaacatcggctatcagggcttctacattccagaaggatacaaagatcgcatgtattcatttttcagaaacttccagcccatgagcaggcaggtggttgatgaggtcaattacaaagacttcaaggccgtcgccataccctaccaacacaacaactctggctttgtgggttacatggctccgaccatgcgccaaggtcaaccctatcccgctaactatccctatccactcattggaacaactgccgtaaatagtgttacgcagaaaaagttcttgtgtgacagaaccatgtggcgcataccgttctcgagcaacttcatgtctatgggggcccttacagacttgggacagaatatgctctatgccaactcagctcatgctctggacatgacctttgaggtggatcccatggatgagcccaccctgctttatcttctcttcgaagttttcgacgtggtcagagtgcatcagccacaccgcggcatcatcgaggcagtctacctgcgtacaccgttctcggccggtaacgctaccacgtaagaagcttcttgcttcttgcaaatagcagctgcaaccatggcctgcggatcccaaaacggctccagcgagcaagagctcagagccattgtccaagacctgggttgcggaccctattttttgggaacctacgataagcgcttcccggggttcatggcccccgataagctcgcctgtgccattgtaaatacggccggacgtgagacggggggagagcactggttggctttcggttggaacccacgttctaacacctgctacctttttgatccttttggattctcggatgatcgtctcaaacagatttaccagtttgaatatgagggtctcctgcgccgcagcgctcttgctaccaaggaccgctgtattacgctggaaaaatctacccagaccgtgcagggtccccgttctgccgcctgcggacttttctgctgcatgttccttcacgcctttgtgcactggcctgaccgtcccatggacggaaaccccaccatgaaattgctaactggagtgccaaacaacatgcttcattctcctaaagtccagcccaccctgtgtgacaatcaaaaagcactctaccattttcttaatacccattcgccttattttcgctcccatcgtacacacatcgaaagggccactgcgttcgaccgtatggatgttcaataatgactcatgtaaacaacgtgttcaataaacatcactttatttttttacatgtatcaaggctctgcattacttatttatttacaagtcgaatgggttctgacgagaatcagaatgacccgcaggcagtgatacgttgcggaactgatacttgggttgccacttgaattcgggaatcaccaacttgggaaccggtatatcgggcaggatgtcactccacagctttctggtcagctgcaaagctccaagcaggtcaggagccgaaatcttgaaatcacaattaggaccagtgctttgagcgcgagagttgcggtacaccggattgcagcactgaaacaccatcagcgacggatgtctcacgcttgccagcacggtgggatctgcaatcatgcccacatccagatcttcagcattggcaatgctgaacggggtcatcttgcaggtctgcctacccatggcgggcacccaattaggcttgtggttgcaatcgcagtgcagggggatcagtatcatcttggcctgatcctgtctgattcctggatacacggctctcatgaaagcatcatattgcttgaaagcctgctgggctttactaccctcggtataaaacatcccgcaggacctgctcgaaaactggttagctgcacagccggcatcattcacacagcagcgggcgtcattgttagctatttgcaccacacttctgccccagcggttttgggtgattttggttcgctcgggattctcctttaaggctcgttgtccgttctcgctggccacatccatctcgataatctgctccttctgaatcataatattgccatgcaggcacttcagcttgccctcataatcattgcagccatgaggccacaacgcacagcctgtacattcccaattatggtgggcgatctgagaaaaagaatgtatcattccctgcagaaatcttcccatcatcgtgctcagtgtcttgtgactagtgaaagttaactggatgcctcggtgctcctcgtttacgtactggtgacagatgcgcttgtattgttcgtgttgctcaggcattagtttaaaagaggttctaagttcgttatccagcctgtacttctccatcagcagacacatcacttccatgcctttctcccaagcagacaccaggggcaagctaatcggattcttaacagtgcaggcagcagctcctttagccagagggtcatctttagcgatcttctcaatgcttcttttgccatccttctcaacgatgcgcacgggcgggtagctgaaacccactgctacaagttgcgcctcttctctttcttcttcgctgtcttgactgatgtcttgcatggggatatgtttggtcttccttggcttctttttggggggtatcggaggaggaggactgtcgctccgttccggagacagggaggattgtgacgtttcgctcaccattaccaactgactgtcggtagaagaacctgaccccacacggcgacaggtgtttctcttcgggggcagaggtggaggcgattgcgaagggctgcggtccgacctggaaggcggatgactggcagaaccccttccgcgttcgggggtgtgctccctgtggcggtcgcttaactgatttccttcgcggctggccattgtgttctcctaggcagagaaacaacagacatggaaactcagccattgctgtcaacatcgccacgagtgccatcacatctcgtcctcagcgacgaggaaaaggagcagagcttaagcattccaccgcccagtcctgccaccacctctaccctagaagataaggaggtcgacgcatctcatgacatgcagaataaaaaagcgaaagagtctgagacagacatcgagcaagacccgggctatgtgacaccggtggaacacgaggaagagttgaaacgctttctagagagagaggatgaaaactgcccaaaacaacgagcagataactatcaccaagatgctggaaatagggatcagaacaccgactacctcatagggcttgacggggaagacgcgctccttaaacatctagcaagacagtcgctcatagtcaaggatgcattattggacagaactgaagtgcccatcagtgtggaagagctcagccgcgcctacgagcttaacctcttttcacctcgtactccccccaaacgtcagccaaacggcacctgcgagccaaatcctcgcttaaacttttatccagcttttgctgtgccagaagtactggctacctatcacatcttttttaaaaatcaaaaaattccagtctcctgccgcgctaatcgcacccgcgccgatgccctactcaatctgggacctggttcacgcttacctgatatagcttccttggaagaggttccaaagatcttcgagggtctgggcaataatgagactcgggccgcaaatgctctgcaaaagggagaaaatggcatggatgagcatcacagcgttctggtggaattggaaggcgataatgccagactcgcagtactcaagcgaagcatcgaggtcacacacttcgcatatcccgctgtcaacctgccccctaaagtcatgacggcggtcatggaccagttactcattaagcgcgcaagtcccctttcagaagacatgcatgacccagatgcctgtgatgagggtaaaccagtggtcagtgatgagcagctaacccgatggctgggcaccgactctcccagggatttggaagagcgtcgcaagcttatgatggccgtggtgctggttaccgtagaactagagtgtctccgacgtttctttaccgattcagaaaccttgcgcaaactcgaagagaatctgcactacacttttagacacggctttgtgcggcaggcatgcaagatatctaacgtggaactcaccaacctggtttcctacatgggtattctgcatgagaatcgcctaggacaaagcgtgctgcacagcaccctgaagggggaagcccgccgtgattacatccgcgattgtgtctatctgtacctgtgccacacgtggcaaaccggcatgggtgtatggcagcaatgtttagaagaacagaacttgaaagagcttgacaagctcttacagaaatctcttaaggttctgtggacagggttcgacgagcgcaccgtcgcttccgacctggcagacctcatcttcccagagcgtctcagggttactttgcgaaacggattgcctgactttatgagccagagcatgcttaacaattttcgctctttcatcctggaacgctccggtatcctgcccgccacctgctgcgcactgccctccgactttgtgcctctcacctaccgcgagtgccccccgccgctatggagtcactgctacctgttccgtctggccaactatctctcctaccactcggatgtgatcgaggatgtgagcggagacggcttgctggagtgtcactgccgctgcaatctgtgcacgccccaccggtccctagcttgcaacccccagttgatgagcgaaacccagataataggcacctttgaattgcaaggccccagcagccaaggcgatgggtcttctcctgggcaaagtttaaaactgaccccgggactgtggacctccgcctacttgcgcaagtttgctccggaagattaccacccctatgaaatcaagttctatgaggaccaatcacagcctccaaaggccgaactttcggcctgcgtcatcacccagggggcaattctggcccaattgcaagccatccaaaaatcccgccaagaatttctactgaaaaagggtaagggggtctaccttgacccccagaccggcgaggaactcaacacaaggttccctcaggatgtcccaacgacgagaaaacaagaagttgaaggtgcagccgccgcccccagaagatatggaggaagattgggacagtcaggcagaggaggcggaggaggacagtctggaggacagtctggaggaagacagtttggaggaggaaaacgaggaggcagaggaggtggaagaagtaaccgccgacaaacagttatcctcggctgcggagacaagcaacagcgctaccatctccgctccgagtcgaggaacccggcggcgtcccagcagtagatgggacgagaccggacgcttcccgaacccaaccagcgcttccaagaccggtaagaaggatcggcagggatacaagtcctggcgggggcataagaatgccatcatctcctgcttgcatgagtgcgggggcaacatatccttcacgcggcgctacttgctattccaccatggggtgaactttccgcgcaatgttttgcattactaccgtcacctccacagcccctactatagccagcaaatcccggcagtctcgacagataaagacagcggcggcgacctccaacagaaaaccagcagcggcagttagaaaatacacaacaagtgcagcaacaggaggattaaagattacagccaacgagccagcgcaaacccgagagttaagaaatcggatctttccaaccctgtatgccatcttccagcagagtcggggtcaagagcaggaactgaaaataaaaaaccgatctctgcgttcgctcaccagaagttgtttgtatcacaagagcgaagatcaacttcagcgcactctcgaggacgccgaggctctcttcaacaagtactgcgcgctgactcttaaagagtaggcagcgaccgcgcttattcaaaaaaggcgggaattacatcatcctcgacatgagtaaagaaattcccacgccttacatgtggagttatcaaccccaaatgggattggcggcaggcgcctcccaggactactccacccgcatgaattggctcagcgccgggccttctatgatttctcgagttaatgatatacgcgcctaccgaaaccaaatacttttggaacagtcagctcttaccaccacgccccgccaacaccttaatcccagaaattggcccgccgccctagtgtaccaggaaagtcccgctcccaccactgtattacttcctcgagacgcccaggccgaagtccaaatgactaatgcaggtgcgcagttagctggcggctccaccctatgtcgtcacaggcctcggcataatataaaacgcctgatgatcagaggccgaggtatccagctcaacgacgagtcggtgagctctccgcttggtctacgaccagacggaatctttcagattgccggctgcgggagatcttccttcacccctcgtcaggctgttctgactttggaaagttcgtcttcgcaaccccgctcgggcggaatcgggaccgttcaatttgtggaggagtttactccctctgtctacttcaaccccttctccggatctcctgggcattacccggacgagttcataccgaacttcgacgcgattagcgagtcagtggacggctacgattgatgtctggtgacgcggctgagctatctcggctgcgacatctagaccactgccgccgctttcgctgctttgcccgggaactcattgagttcatctacttcgaactccccaaggatcaccctcaaggtccggcccacggagtgcggatttctatcgaaggcaaaatagactctcgcctgcaacgaattttctcccagcggcccgtgctgatcgagcgagaccagggaaacaccacggtttccatctactgcatttgtaatcaccccggattgcatgaaagcctttgctgtcttatgtgtactgagtttaataaaaactgaattaagactctcctacggactgccgcttcttcaacccggattttacaaccagaagaacgaaacttttcctgtcgtccaggactctgttaacttcacctttcctactcacaaactagaagctcaacgactacaccgcttttccagaagcattttccctactaatactactttcaaaaccggaggtgagctccaaggtcttcctacagaaaacccttgggtggaagcgggccttgtagtgctaggaattcttgcgggtgggcttgtgattattctttgctacctatacacaccttgcttcactttcttagtggtgttgtggtattggtttaaaaaatggggcccatactagtcttgcttgttttactttcgcttttggaaccgggttctgccaattacgatccatgtctagacttcgacccagaaaactgcacacttacttttgcacccgacacaagccgcatctgtggagttcatcgcctctcttacgaacttggcccccaacgacaaaaatttacctgcatggtgggaatcaaccccatagttatcacccagcaaagtggagatactaagggttgcattcactgctcctgcgattccatcgagtgcacctacaccctgctgaagaccctatgcggcctaagagacctgctaccaatgaattaaaaaatgattaataaaaaatcacttacttgaaatcagcaataaggtctctgttgaaattttctcccagcagcacctcacttccctcttcccaactctggtattctaaaccccgttcagcggcatactttctccatactttaaaggggatgtcaaattttagctcctctcctgtacccacaatcttcatgtctttcttcccagatgaccaagagagtccggctcagtgactccttcaaccctgtctacccctatgaagatgaaagcacctcccaacacccctttataaacccagggtttatttccccaaatggcttcacacaaagcccaaacggagttcttactttaaaatgtttaaccccactaacaaccacaggcggatctctacagctaaaagtgggagggggacttacagtggatgacaccaacggttttttgaaagaaaacataagtgccaccacaccactcgttaagactggtcactctataggtttaccactaggagccggattgggaacgaatgaaaataaactttgtatcaaattaggacaaggacttacattcaattcaaacaacatttgcattgatgacaatattaacaccttatggacaggagtcaaccccaccgaagccaactgtcaaatcatgaactccagtgaatctaatgattgcaaattaattctaacactagttaaaactggagcactagtcactgcatttgtttatgttataggagtatctaacaattttaatatgctaactacacacagaaatataaattttactgcagagctgtttttcgattctactggtaatttactaactagactctcatccctcaaaactccacttaatcataaatcaggacaaaacatggctactggtgccattactaatgctaaaggtttcatgcccagcacgactgcctatcctttcaatgataattctagagaaaaagaaaactacatttacggaacttgttactacacagctagtgatcgcactgcttttcccattgacatatctgtcatgcttaaccgaagagcaataaatgacgagacatcatattgtattcgtataacttggtcctggaacacaggagatgccccagaggtgcaaacctctgctacaaccctagtcacctccccatttaccttttactacatcagagaagacgactgacaaataaagtttgcgatcgccaggcccaccatgggatggagctgcattatcctgtttctggttgctactgccactggagtgcatagcgaggtacagcttgtcgagtctggaggtgggctggtacaaccaggcggatccctcagactgtcttgtgccgcatctggcttcacgttcagcgatagttggatacactgggtgaggcaggcaccagggaaaggtctggagtgggtggcttggataagcccatatggtggctccacatattacgccgactcagtgaagggtcgcttcaccatttctgctgatacgtcaaagaacacagcctatctccagatgaactcccttcgtgccgaggataccgctgtctactattgtgcccggagacattggcctggcgggttcgactactggggacaggggactctcgtcactgtttctgcagcgtctactaaagggcccagcgtgtttcctcttgctccctccagtaagtcaactagtggcggcaccgctgctttgggctgcctggtcaaggactattttccagagcctgtaaccgtgagctggaatagtggagcattgacctcaggagtgcacacatttcccgcagtgctgcagtcaagcggactgtacagcctttccagtgtggtgaccgttccttcctcaagtctgggcactcaaacctacatctgcaacgtgaaccacaaacccagcaataccaaagtcgacaagaaggttgagccgaagagctgtgacaaaacgcacacatgccctccatgtcccgccccagaactgctcggtggaccgtccgtgttcctgtttcctccgaagcccaaggacacactgatgatcagtcgcaccccagaagtcacctgtgtggtggtggcggtaagccacgaagatcccgaggtcaagttcaattggtatgtcgatggggttgaggtccacaatgccaagactaagccaagggaggaacagtatgccagcacataccgagtcgtgtctgtgctgaccgttctgcatcaggactggctcaacgggaaagagtacaagtgcaaagtgtccaacaaggcacttcctgcccctatcgagaaaaccatcagcaaggcgaaaggtcagcccagagaaccacaagtctacacactgccaccctctcgggacgaactcacaaagaatcaggtgtcactgacatgcttggttaaaggcttttaccccagcgatattgccgtggaatgggaatccaatgggcaacctgagaacaactacaagactacacctcccgtattggatagcgatggaagcttcttcctgtactctaagttgacggttgacaaatccaggtggcagcagggcaatgtgttttcttgctccgtaatgcatgaagctctgcataatcactatacccagaaatccctctcactgagtccgggcaaatgactcgaggtttctagaagttgtctcctcctgcactgactgactgacctaacgttactggccgaagccgcttggaataaggccggtgtgcgtttgtctatatgttattttccaccatattgccgtcttttggcaatgtgagggcccggaaacctggccctgtcttcttgacgagcattcctaggggtctttcccctctcgccaaaggaatgcaaggtctgttgaatgtcgtgaaggaagcagttcctctggaagcttcttgaagacaaacaacgtctgtagcgaccctttgcaggcagcggaaccccccacctggcgacaggtgcctctgcggccaaaagccacgtgtataagatacacctgcaaaggcggcacaaccccagtgccacgttgtgagttggatagttgtggaaagagtcaaatggctcccctcaagcgtattcaacaaggggctgaaggatgcccagaaggtaccccattgtatgggatctgatctggggcctcggtgcacatgcttttcatgtgtttagtcgaggttaaaaaacgtctaggccccccgaaccacggggacgtggttttcctttgaaaaacacgatgataataacatggactggacctggcgcgtgttttgcctgctcgccgtggctcctggggcccacagcgatatccaaatgactcagtctccctcttcactgtctgcaagcgttggcgatagggtgacaattacctgtagagcgagtcaggacgtttcaaccgctgtagcctggtaccagcagaaaccgggaaaagcccctaagctgctcatttactccgcttcctttctctattccggagtgcctagccgatttagtggctctggttcagggactgacttcacactgaccatatccagtctgcaaccagaggatttcgcgacgtactactgtcagcagtatctgtatcaccccgctacatttgggcaagggacaaaagtggagatcaaacggactgtagccgcacccagcgtgttcatctttccaccctctgatgagcagcttaagagcggtacggcatctgtcgtgtgcttgctgaacaacttctatcctcgtgaagccaaagtccagtggaaggtggacaatgccttgcagtcaggcaactcacaggaaagcgtcactgaacaggacagcaaggatagtacctacagcctgtccagcacactgactctctccaaagccgactatgagaagcacaaggtttacgcttgcgaagtgacccatcaaggccttagcagtccagtcaccaagtccttcaatcgcggagagtgctgagctagcttgactgactgagatacagcgtaccttcagctcacagacatgataagatacattgatgagtttggacaaaccacaactagaatgcagtgaaaaaaatgctttatttgtgaaatttgtgatgctattgctttatttgtaaccattataagctgcaataaacaagttaacaacaacaattgcattcattttatgtttcaggttcagggggaggtgtgggaggttttttaaagcaagtaaaacctctacaaatgtggtagtcgtcagctatcctgcaggaacttgtttatttgaaaatcaattcacaaaatccgagtagttattttgcctcccccttcccatttaacagaatacaccaatctctccccacgcacagctttaaacatttggataccattagatatagacatggttttagattccacattccaaacagtttcagagcgagccaatctggggtcagtgatagataaaaatccatcgggatagtcttttaaagcgctttcacagtccaactgctgcggatgcgactccggagtctggatcacggtcatctggaagaagaacgatgggaatcataatccgaaaacggtatcggacgattgtgtctcatcaaacccacaagcagccgctgtctgcgtcgctccgtgcgactgctgtttatgggatcagggtccacagtgtcctgaagcatgattttaatagcccttaacatcaactttctggtgcgatgcgcgcagcaacgcattctgatttcactcaaatctttgcagtaggtacaacacattattacaatattgtttaataaaccataattaaaagcgctccagccaaaactcatatctgatataatcgcccctgcatgaccatcataccaaagtttaatataaattaaatgacgttccctcaaaaacacactacccacatacatgatctcttttggcatgtgcatattaacaatctgtctgtaccatggacaacgttggttaatcatgcaacccaatataaccttccggaaccacactgccaacaccgctcccccagccatgcattgaagtgaaccctgctgattacaatgacaatgaagaacccaattctctcgaccgtgaatcacttgagaatgaaaaatatctatagtggcacaacatagacataaatgcatgcatcttctcataatttttaactcctcaggatttagaaacatatcccagggaataggaagctcttgcagaacagtaaagctggcagaacaaggaagaccacgaacacaacttacactatgcatagtcatagtatcacaatctggcaacagcgggtggtcttcagtcatagaagctcgggtttcattttcctcacaacgtggtaactgggctctggtgtaagggtgatgtctggcgcatgatgtcgagcgtgcgcgcaaccttgtcataatggagttgcttcctgacattctcgtattttgtatagcaaaacgcggccctggcagaacacactcttcttcgccttctatcctgccgcttagcgtgttccgtgtgatagttcaagtacaaccacactcttaagttggtcaaaagaatgctggcttcagttgtaatcaaaactccatcgcatctaatcgttctgaggaaatcatccaagcaatgcaactggattgtgtttcaagcaggagaggagagggaagagacggaagaaccatgttaatttttattccaaacgatctcgcagtacttcaaattgtagatcgcgcagatggcatctctcgcccccactgtgttggtgaaaaagcacagctagatcaaaagaaatgcgattttcaaggtgctcaacggtggcttccagcaaagcctccacgcgcacatccaagaacaaaagaataccaaaagaaggagcattttctaactcctcaatcatcatattacattcctgcaccattcccagataattttcagctttccagccttgaattattcgtgtcagttcttgtggtaaatccaatccacacattacaaacaggtcccggagggcgccctccaccaccattcttaaacacaccctcataatgacaaaatatcttgctcctgtgtcacctgtagcgaattgagaatggcaacatcaattgacatgcccttggctctaagttcttctttaagttctagttgtaaaaactctctcatattatcaccaaactgcttagccagaagccccccgggaacaagagcaggggacgctacagtgcagtacaagcgcagacctccccaattggctccagcaaaaacaagattggaataagcatattgggaaccgccagtaatatcatcgaagttgctggaaatataatcaggcagagtttcttgtaaaaattgaataaaagaaaaatttgccaaaaaaacattcaaaacctctgggatgcaaatgcaataggttaccgcgctgcgctccaacattgttagttttgaattagtctgcaaaaataaaaaaaaaaacaagcgtcatatcatagtagcctgacgaacagatggataaatcagtctttccatcacaagacaagccacagggtctccagctcgaccctcgtaaaacctgtcatcatgattaaacaacagcaccgaaagttcctcgcggtgaccagcatgaataattcttgatgaagcatacaatccagacatgttagcatcagttaacgagaaaaaacagccaacatagcctttgggtataattatgcttaatcgtaagtatagcaaagccacccctcgcggatacaaagtaaaaggcacaggagaataaaaaatataattatttctctgctgctgttcaggcaacgtcgcccccggtccctctaaatacacatacaaagcctcatcagccatggcttaccagacaaagtacagcgggcacacaaagcacaagctctaaagtgactctccaacctctccacaatatatatatacacaagccctaaactgacgtaatgggagtaaagtgtaaaaaatcccgccaaacccaacacacaccccgaaactgcgtcaccagggaaaagtacagtttcacttccgcaatcccaacaggcgtaacttcctctttctcacggtacgtgatatcccactaacttgcaacgtcattttcccacggtcgcaccgccccttttagccgttaaccccacagccaatcaccacacgatccacactttttaaaatcacctcatttacatattggcaccattccatctataaggtatattatatagataga

SEQ ID NO: 47 - DNA, 5288 bp, Artificial Sequence
  DNA sequence corresponding to E2B region of the EnAd genome (bp 10355-5068)
ctatggcatctcgatccagcagacctcctcgtttcgcgggtttggacggctcctggaatagggtatgagacgatgggcgtccagcgctgccagggttcggtccttccagggtctcagtgttcgagtcagggttgtttccgtcacagtgaaggggtgtgcgcctgcttgggcgcttgccagggtgcgcttcagactcatcctgctggtcgaaaacttctgtcgcttggcgccctgtatgtcggccaagtagcagtttaccatgagttcgtagttgagcgcctcggctgcgtggcctttggcgcggagcttacctttggaagttttcttgcataccgggcagtataggcatttcagcgcatacaacttgggcgcaaggaaaacggattctggggagtatgcatctgcgccgcaggaggcgcaaacagtttcacattccaccagccaggttaaatccggttcattggggtcaaaaacaagttttccgccatattttttgatgcgtttcttacctttggtctccatgagttcgtgtcctcgttgagtgacaaacaggctgtccgtgtccccgtagactgattttacaggcctcttctccagtggagtgcctcggtcttcttcgtacaggaactctgaccactctgatacaaaggcgcgcgtccaggccagcacaaaggaggctatgtgggaggggtagcgatcgttgtcaaccagggggtccaccttttccaaagtatgcaaacacatgtcaccctcttcaacatccaggaatgtgattggcttgtaggtgtatttcacgtgacctggggtccccgctgggggggtataaaagggggcggttctttgctcttcctcactgtcttccggatcgctgtccaggaacgtcagctgttggggtaggtattccctctcgaaggcgggcatgacctctgcactcaggttgtcagtttctaagaacgaggaggatttgatattgacagtgccggttgagatgcctttcatgaggttttcgtccatctggtcagaaaacacaatttttttattgtcaagtttggtggcaaatgatccatacagggcgttggataaaagtttggcaatggatcgcatggtttggttcttttccttgtccgcgcgctctttggcggcgatgttgagttggacatactcgcgtgccaggcacttccattcggggaagatagttgttaattcatctggcacgattctcacttgccaccctcgattatgcaaggtaattaaatccacactggtggccacctcgcctcgaaggggttcattggtccaacagagcctacctcctttcctagaacagaaagggggaagtgggtctagcataagttcatcgggagggtctgcatccatggtaaagattcccggaagtaaatccttatcaaaatagctgatgggagtggggtcatctaaggccatttgccattctcgagctgccagtgcgcgctcatatgggttaaggggactgccccatggcatgggatgggtgagtgcagaggcatacatgccacagatgtcatagacgtagatgggatcctcaaagatgcctatgtaggttggatagcatcgcccccctctgatacttgctcgcacatagtcatatagttcatgtgatggcgctagcagccccggacccaagttggtgcgattgggtttttctgttctgtagacgatctggcgaaagatggcgtgagaattggaagagatggtgggtctttgaaaaatgttgaaatgggcatgaggtagacctacagagtctctgacaaagtgggcataagattcttgaagcttggttaccagttcggcggtgacaagtacgtctagggcgcagtagtcaagtgtttcttgaatgatgtcataacctggttggtttttcttttcccacagttcgcggttgagaaggtattcttcgcgatccttccagtactcttctagcggaaacccgtctttgtctgcacggtaagatcctagcatgtagaactgattaactgccttgtaagggcagcagcccttctctacgggtagagagtatgcttgagcagcttttcgtagcgaagcgtgagtaagggcaaaggtgtctctgaccatgactttgaggaattggtatttgaagtcgatgtcgtcacaggctccctgttcccagagttggaagtctacccgtttcttgtaggcggggttgggcaaagcgaaagtaacatcattgaagagaatcttgccggccctgggcatgaaattgcgagtgatgcgaaaaggctgtggtacttccgctcggttattgataacctgggcagctaggacgatctcgtcgaaaccgttgatgttgtgtcctacgatgtataattctatgaaacgcggcgtgcctctgacgtgaggtagcttactgagctcatcaaaggttaggtctgtggggtcagataaggcgtagtgttcgagagcccattcgtgcaggtgaggattcgctttaaggaaggaggaccagaggtccactgccagtgctgtttgtaactggtcccggtactgacgaaaatgccgtccgactgccattttttctggggtgacgcaatagaaggtttgggggtcctgccgccagcgatcccacttgagttttatggcgaggtcataggcgatgttgacgagccgctggtctccagagagtttcatgaccagcatgaaggggattagctgcttgccaaaggaccccatccaggtgtaggtttccacatcgtaggtgagaaagagcctttctgtgcgaggatgagagccaatcgggaagaactggatctcctgccaccagttggaggaatggctgttgatgtgatggaagtagaactccctgcgacgcgccgagcattcatgcttgtgcttgtacagacggccgcagtagtcgcagcgttgcacgggttgtatctcgtgaatgagttgtacctggcttcccttgacgagaaatttcagtgggaagccgaggcctggcgattgtatctcgtgctttactatgttgtctgcatcggcctgttcatcttctgtctcgatggtggtcatgctgacgagccctcgcgggaggcaagtccagacctcggcgcggcaggggcggagctcgaggacgagagcgcgcaggctggagctgtccagggtcctgagacgctgcggactcaggttagtaggcagtgtcaggagattaacttgcatgatcttttggagggcgtgcgggaggttcagatagtacttgatctcaacgggtccgttggtggagatgtcgatggcttgcagggttccgtgtcccttgggcgctaccaccgtgcccttgtttttcattttggacggcggtggctctgttgcttcttgcatgtttagaagcggtgtcgagggcgcgcaccgggcggcaggggcggctcgggacccggcggcatggctggcagtggtacgtcggcgccgcgcgcgggtaggttctggtactgcgccctgagaagactcgcatgcgcgacgacgcggcggttgacatcctggatctgacgcctctgggtgaaagctaccggccccgtgagcttgaacctgaaagagagttcaacagaatcaatctcggtatcgttgacggcggcttgcctaaggatttcttgcacgtcaccagagttgtcctggtaggcgatctccgccatgaactgctcgatctcttcctcttgaagatctccgcggcccgctctctcgacggtggccgcgaggtcgttggagatgcgcccaatgagttgagagaatgcattcatgcccgcctcgttccagacgcggctgtagaccacggcccccacgggatctctcgcgcgcatgaccacctgggcgaggttgagctccacgtggcgggtgaagaccgcatagttgcataggcgctggaaaaggtagttgagtgtggtggcgatgtgctcggtgacgaagaaatacatgatccatcgtctcagcggcatctcgctgacatcgcccagagcttccaagcgctccatggcctcgtagaagtccacggcaaaattaaaaaactgggagtttcgcgcggacacggtcaactcctcttccagaagacggataagttcggcgatggtggtgcgcacctcgcgctcgaaagcccctgggatttcttcctcaatctcttcttcttccactaacatctcttcctcttcaggtggggctgcaggaggagggggaacgcggcgacgccggcggcgcacgggcagacggtcgatgaatctttcaatgacctctccgcggcggcggcgcatggtttcagtgacggcgcggccgttctcgcgcggtcgcagagtaaaaacaccgccgcgcatctccttaaagtggtgactgggaggttctccgtttgggagggagagggcgctgattatacattttattaattggcccgtagggactgcacgcagagatctgatcgtgtcaagatccacgggatctgaaaacctttcgacgaaagcgtctaaccagtcacagtcacaaggtaggctgagtacggcttcttgtgggcgggggtggttatgtgttcggtctgggtcttctgtttcttcttcatctcgggaaggtgagacgatgctgctggtgatgaaattaaagtaggcagttctaagacggcggatggtggcgaggagcaccaggtctttgggtccggcttgctggatacgcaggcgattggccattccccaagcattatcctgacatctagcaagatctttgtagtagtcttgcatgagccgttctacgggcacttcttcctcacccgttctgccatgcatacgtgtgagtccaaatccgcgcattggttgtaccagtgccaagtcagctacgactctttcggcgaggatggcttgctgtacttgggtaagggtggcttgaaagtcatcaaaatccacaaagcggtggtaagctcctgtattaatggtgtaagcacagttggccatgactgaccagttaactgtctggtgaccagggcgcacgagctcggtgtatttaaggcgcgaataggcgcgggtgtcaaagatgtaatcgttgcaggtgcgcaccagatactggtaccctataagaaaatgcggcggtggttggcggtagagaggccatcgttctgtagctggagcgccaggggcgaggtcttccaacataaggcggtgatagccgtagatgtacctggacatccaggtgattcctgcggcggtagtagaagcccgaggaaactcgcgtacgcggttccaaatgttgcgtagcggcatgaagtagttcat

SEQ ID NO: 48 - DNA, 33432 bp, Artificial Sequence
  NG-167 virus genome sequence consisting of a transgene cassette that encodes an anti-VEGF ScFv with a C-terminal His6 tag, inserted in the region BY.
tctatctatataatataccttatagatggaatggtgccaatatgtaaatgaggtgattttaaaaagtgtggatcgtgtggtgattggctgtggggttaacggctaaaaggggcggtgcgaccgtgggaaaatgacgttttgtgggggtggagtttttttgcaagttgtcgcgggaaatgtgacgcataaaaaggcttttttctcacggaactacttagttttcccacggtatttaacaggaaatgaggtagttttgaccggatgcaagtgaaaattgttgattttcgcgcgaaaactgaatgaggaagtgtttttctgaataatgtggtatttatggcagggtggagtatttgttcagggccaggtagactttgacccattacgtggaggtttcgattaccgtgttttttacctgaatttccgcgtaccgtgtcaaagtcttctgtttttacgtaggtgtcagctgatcgctagggtatttatacctcagggtttgtgtcaagaggccactcttgagtgccagcgagaagagttttctcctctgcgccggcagtttaataataaaaaaatgagagatttgcgatttctgcctcaggaaataatctctgctgagactggaaatgaaatattggagcttgtggtgcacgccctgatgggagacgatccggagccacctgtgcagctttttgagcctcctacgcttcaggaactgtatgatttagaggtagagggatcggaggattctaatgaggaagctgtaaatggcttttttaccgattctatgcttttagctgctaatgaagggttagaattagatccgcctttggacacttttgatactccaggggtaattgtggaaagcggtacaggtgtaagaaaattacctgatttgagttccgtggactgtgatttgcactgctatgaagacgggtttcctccgagtgatgaggaggaccatgaaaaggagcagtccatgcagactgcagcgggtgagggagtgaaggctgccaatgttggttttcagttggattgcccggagcttcctggacatggctgtaagtcttgtgaatttcacaggaaaaatactggagtaaaggaactgttatgttcgctttgttatatgagaacgcactgccactttatttacagtaagtgtgtttaagttaaaatttaaaggaatatgctgtttttcacatgtatattgagtgtgagttttgtgcttcttattataggtcctgtgtctgatgctgatgaatcaccatctcctgattctactacctcacctcctgagattcaagcacctgttcctgtggacgtgcgcaagcccattcctgtgaagcttaagcctgggaaacgtccagcagtggaaaaacttgaggacttgttacagggtggggacggacctttggacttgagtacacggaaacgtccaagacaataagtgttccatatccgtgtttacttaaggtgacgtcaatatttgtgtgacagtgcaatgtaataaaaatatgttaactgttcactggtttttattgctttttgggcggggactcaggtatataagtagaagcagacctgtgtggttagctcataggagctggctttcatccatggaggtttgggccattttggaagaccttaggaagactaggcaactgttagagaacgcttcggacggagtctccggtttttggagattctggttcgctagtgaattagctagggtagtttttaggataaaacaggactataaacaagaatttgaaaagttgttggtagattgcccaggactttttgaagctcttaatttgggccatcaggttcactttaaagaaaaagttttatcagttttagacttttcaaccccaggtagaactgctgctgctgtggcttttcttacttttatattagataaatggatcccgcagactcatttcagcaggggatacgttttggatttcatagccacagcattgtggagaacatggaaggttcgcaagatgaggacaatcttaggttactggccagtgcagcctttgggtgtagcgggaatcctgaggcatccaccggtcatgccagcggttctggaggaggaacagcaagaggacaacccgagagccggcctggaccctccagtggaggaggcggagtagctgacttgtctcctgaactgcaacgggtgcttactggatctacgtccactggacgggataggggcgttaagagggagagggcatctagtggtactgatgctagatctgagttggctttaagtttaatgagtcgcagacgtcctgaaaccatttggtggcatgaggttcagaaagagggaagggatgaagtttctgtattgcaggagaaatattcactggaacaggtgaaaacatgttggttggagcctgaggatgattgggaggtggccattaaaaattatgccaagatagctttgaggcctgataaacagtataagattactagacggattaatatccggaatgcttgttacatatctggaaatggggctgaggtggtaatagatactcaagacaaggcagttattagatgctgcatgatggatatgtggcctggggtagtcggtatggaagcagtaacttttgtaaatgttaagtttaggggagatggttataatggaatagtgtttatggccaataccaaacttatattgcatggttgtagcttttttggtttcaacaatacctgtgtagatgcctggggacaggttagtgtacggggatgtagtttctatgcgtgttggattgccacagctggcagaaccaagagtcaattgtctctgaagaaatgcatatttcaaagatgtaacctgggcattctgaatgaaggcgaagcaagggtccgccactgcgcttctacagatactggatgttttattttgattaagggaaatgccagcgtaaagcataacatgatttgcggtgcttccgatgagaggccttatcaaatgctcacttgtgctggtgggcattgtaatatgctggctactgtgcatattgtttcccatcaacgcaaaaaatggcctgtttttgatcacaatgtgatgacgaagtgtaccatgcatgcaggtgggcgtagaggaatgtttatgccttaccagtgtaacatgaatcatgtgaaagtgttgttggaaccagatgccttttccagaatgagcctaacaggaatttttgacatgaacatgcaaatctggaagatcctgaggtatgatgatacgagatcgagggtacgcgcatgcgaatgcggaggcaagcatgccaggttccagccggtgtgtgtagatgtgactgaagatctcagaccggatcatttggttattgcccgcactggagcagagttcggatccagtggagaagaaactgactaaggtgagtattgggaaaactttggggtgggattttcagatggacagattgagtaaaaatttgttttttctgtcttgcagctgtcatgagtggaaacgcttcttttaaggggggagtcttcagcccttatctgacagggcgtctcccatcctgggcaggagttcgtcagaatgttatgggatctactgtggatggaagacccgtccaacccgccaattcttcaacgctgacctatgctactttaagttcttcacctttggacgcagctgcagctgccgccgccgcttctgttgccgctaacactgtgcttggaatgggttactatggaagcatcatggctaattccacttcctctaataacccttctaccctgactcaggacaagttacttgtccttttggcccagctggaggctttgacccaacgtctgggtgaactttctcagcaggtggtcgagttgcgagtacaaactgagtctgctgtcggcacggcaaagtctaaataaaaaaatcccagaatcaatgaataaataaacaagcttgttgttgatttaaaatcaagtgtttttatttcatttttcgcgcacggtatgccctagaccaccgatctctatcattgagaactcggtggattttttccaggatcctatagaggtgggattgaatgtttagatacatgggcattaggccgtctttggggtggagatagctccattgaagggattcatgctccggggtagtgttgtaaatcacccagtcataacaaggtcgcagtgcatggtgttgcacaatatcttttagaagtaggctgattgccacagataagcccttggtgtaggtgtttacaaaccggttgagctgggatgggtgcattcggggtgaaattatgtgcattttggattggatttttaagttggcaatattgccgccaagatcccgtcttgggttcatgttatgaaggaccaccaagacggtgtatccggtacatttaggaaatttatcgtgcagcttggatggaaaagcgtggaaaaatttggagacacccttgtgtcctccaagattttccatgcactcatccatgataatagcaatggggccgtgggcagcggcgcgggcaaacacgttccgtgggtctgacacatcatagttatgttcctgagttaaatcatcataagccattttaatgaatttggggcggagagtaccagattggggtatgaatgttccttcgggccccggagcatagttcccctcacagatttgcatttcccaagctttcagttccgagggtggaatcatgtccacctggggggctatgaaaaacaccgtttctggggcgggggtgattaattgtgatgatagcaaatttctgagcaattgagatttgccacatccggtggggccataaatgattccgattacgggttgcaggtggtagtttagggaacggcaactgccgtcttctcgaagcaagggggccacctcgttcatcatttcccttacatgcatattttcccgcaccaaatccattaggaggcgctctcctcctagtgatagaagttcttgtagtgaggaaaagtttttcagcggtttcagaccgtcagccatgggcattttggagagagtttgctgcaaaagttctagtctgttccacagttcagtgatgtgttctatggcatctcgatccagcagacctcctcgtttcgcgggtttggacggctcctggaatagggtatgagacgatgggcgtccagcgctgccagggttcggtccttccagggtctcagtgttcgagtcagggttgtttccgtcacagtgaaggggtgtgcgcctgcttgggcgcttgccagggtgcgcttcagactcatcctgctggtcgaaaacttctgtcgcttggcgccctgtatgtcggccaagtagcagtttaccatgagttcgtagttgagcgcctcggctgcgtggcctttggcgcggagcttacctttggaagttttcttgcataccgggcagtataggcatttcagcgcatacaacttgggcgcaaggaaaacggattctggggagtatgcatctgcgccgcaggaggcgcaaacagtttcacattccaccagccaggttaaatccggttcattggggtcaaaaacaagttttccgccatattttttgatgcgtttcttacctttggtctccatgagttcgtgtcctcgttgagtgacaaacaggctgtccgtgtccccgtagactgattttacaggcctcttctccagtggagtgcctcggtcttcttcgtacaggaactctgaccactctgatacaaaggcgcgcgtccaggccagcacaaaggaggctatgtgggaggggtagcgatcgttgtcaaccagggggtccaccttttccaaagtatgcaaacacatgtcaccctcttcaacatccaggaatgtgattggcttgtaggtgtatttcacgtgacctggggtccccgctgggggggtataaaagggggcggttctttgctcttcctcactgtcttccggatcgctgtccaggaacgtcagctgttggggtaggtattccctctcgaaggcgggcatgacctctgcactcaggttgtcagtttctaagaacgaggaggatttgatattgacagtgccggttgagatgcctttcatgaggttttcgtccatctggtcagaaaacacaatttttttattgtcaagtttggtggcaaatgatccatacagggcgttggataaaagtttggcaatggatcgcatggtttggttcttttccttgtccgcgcgctctttggcggcgatgttgagttggacatactcgcgtgccaggcacttccattcggggaagatagttgttaattcatctggcacgattctcacttgccaccctcgattatgcaaggtaattaaatccacactggtggccacctcgcctcgaaggggttcattggtccaacagagcctacctcctttcctagaacagaaagggggaagtgggtctagcataagttcatcgggagggtctgcatccatggtaaagattcccggaagtaaatccttatcaaaatagctgatgggagtggggtcatctaaggccatttgccattctcgagctgccagtgcgcgctcatatgggttaaggggactgccccatggcatgggatgggtgagtgcagaggcatacatgccacagatgtcatagacgtagatgggatcctcaaagatgcctatgtaggttggatagcatcgcccccctctgatacttgctcgcacatagtcatatagttcatgtgatggcgctagcagccccggacccaagttggtgcgattgggtttttctgttctgtagacgatctggcgaaagatggcgtgagaattggaagagatggtgggtctttgaaaaatgttgaaatgggcatgaggtagacctacagagtctctgacaaagtgggcataagattcttgaagcttggttaccagttcggcggtgacaagtacgtctagggcgcagtagtcaagtgtttcttgaatgatgtcataacctggttggtttttcttttcccacagttcgcggttgagaaggtattcttcgcgatccttccagtactcttctagcggaaacccgtctttgtctgcacggtaagatcctagcatgtagaactgattaactgccttgtaagggcagcagcccttctctacgggtagagagtatgcttgagcagcttttcgtagcgaagcgtgagtaagggcaaaggtgtctctgaccatgactttgaggaattggtatttgaagtcgatgtcgtcacaggctccctgttcccagagttggaagtctacccgtttcttgtaggcggggttgggcaaagcgaaagtaacatcattgaagagaatcttgccggccctgggcatgaaattgcgagtgatgcgaaaaggctgtggtacttccgctcggttattgataacctgggcagctaggacgatctcgtcgaaaccgttgatgttgtgtcctacgatgtataattctatgaaacgcggcgtgcctctgacgtgaggtagcttactgagctcatcaaaggttaggtctgtggggtcagataaggcgtagtgttcgagagcccattcgtgcaggtgaggattcgctttaaggaaggaggaccagaggtccactgccagtgctgtttgtaactggtcccggtactgacgaaaatgccgtccgactgccattttttctggggtgacgcaatagaaggtttgggggtcctgccgccagcgatcccacttgagttttatggcgaggtcataggcgatgttgacgagccgctggtctccagagagtttcatgaccagcatgaaggggattagctgcttgccaaaggaccccatccaggtgtaggtttccacatcgtaggtgagaaagagcctttctgtgcgaggatgagagccaatcgggaagaactggatctcctgccaccagttggaggaatggctgttgatgtgatggaagtagaactccctgcgacgcgccgagcattcatgcttgtgcttgtacagacggccgcagtagtcgcagcgttgcacgggttgtatctcgtgaatgagttgtacctggcttcccttgacgagaaatttcagtgggaagccgaggcctggcgattgtatctcgtgctttactatgttgtctgcatcggcctgttcatcttctgtctcgatggtggtcatgctgacgagccctcgcgggaggcaagtccagacctcggcgcggcaggggcggagctcgaggacgagagcgcgcaggctggagctgtccagggtcctgagacgctgcggactcaggttagtaggcagtgtcaggagattaacttgcatgatcttttggagggcgtgcgggaggttcagatagtacttgatctcaacgggtccgttggtggagatgtcgatggcttgcagggttccgtgtcccttgggcgctaccaccgtgcccttgtttttcattttggacggcggtggctctgttgcttcttgcatgtttagaagcggtgtcgagggcgcgcaccgggcggcaggggcggctcgggacccggcggcatggctggcagtggtacgtcggcgccgcgcgcgggtaggttctggtactgcgccctgagaagactcgcatgcgcgacgacgcggcggttgacatcctggatctgacgcctctgggtgaaagctaccggccccgtgagcttgaacctgaaagagagttcaacagaatcaatctcggtatcgttgacggcggcttgcctaaggatttcttgcacgtcaccagagttgtcctggtaggcgatctccgccatgaactgctcgatctcttcctcttgaagatctccgcggcccgctctctcgacggtggccgcgaggtcgttggagatgcgcccaatgagttgagagaatgcattcatgcccgcctcgttccagacgcggctgtagaccacggcccccacgggatctctcgcgcgcatgaccacctgggcgaggttgagctccacgtggcgggtgaagaccgcatagttgcataggcgctggaaaaggtagttgagtgtggtggcgatgtgctcggtgacgaagaaatacatgatccatcgtctcagcggcatctcgctgacatcgcccagagcttccaagcgctccatggcctcgtagaagtccacggcaaaattaaaaaactgggagtttcgcgcggacacggtcaactcctcttccagaagacggataagttcggcgatggtggtgcgcacctcgcgctcgaaagcccctgggatttcttcctcaatctcttcttcttccactaacatctcttcctcttcaggtggggctgcaggaggagggggaacgcggcgacgccggcggcgcacgggcagacggtcgatgaatctttcaatgacctctccgcggcggcggcgcatggtttcagtgacggcgcggccgttctcgcgcggtcgcagagtaaaaacaccgccgcgcatctccttaaagtggtgactgggaggttctccgtttgggagggagagggcgctgattatacattttattaattggcccgtagggactgcacgcagagatctgatcgtgtcaagatccacgggatctgaaaacctttcgacgaaagcgtctaaccagtcacagtcacaaggtaggctgagtacggcttcttgtgggcgggggtggttatgtgttcggtctgggtcttctgtttcttcttcatctcgggaaggtgagacgatgctgctggtgatgaaattaaagtaggcagttctaagacggcggatggtggcgaggagcaccaggtctttgggtccggcttgctggatacgcaggcgattggccattccccaagcattatcctgacatctagcaagatctttgtagtagtcttgcatgagccgttctacgggcacttcttcctcacccgttctgccatgcatacgtgtgagtccaaatccgcgcattggttgtaccagtgccaagtcagctacgactctttcggcgaggatggcttgctgtacttgggtaagggtggcttgaaagtcatcaaaatccacaaagcggtggtaagctcctgtattaatggtgtaagcacagttggccatgactgaccagttaactgtctggtgaccagggcgcacgagctcggtgtatttaaggcgcgaataggcgcgggtgtcaaagatgtaatcgttgcaggtgcgcaccagatactggtaccctataagaaaatgcggcggtggttggcggtagagaggccatcgttctgtagctggagcgccaggggcgaggtcttccaacataaggcggtgatagccgtagatgtacctggacatccaggtgattcctgcggcggtagtagaagcccgaggaaactcgcgtacgcggttccaaatgttgcgtagcggcatgaagtagttcattgtaggcacggtttgaccagtgaggcgcgcgcagtcattgatgctctatagacacggagaaaatgaaagcgttcagcgactcgactccgtagcctggaggaacgtgaacgggttgggtcgcggtgtaccccggttcgagacttgtactcgagccggccggagccgcggctaacgtggtattggcactcccgtctcgacccagcctacaaaaatccaggatacggaatcgagtcgttttgctggtttccgaatggcagggaagtgagtcctattttttttttttgccgctcagatgcatcccgtgctgcgacagatgcgcccccaacaacagcccccctcgcagcagcagcagcagcaatcacaaaaggctgtccctgcaactactgcaactgccgccgtgagcggtgcgggacagcccgcctatgatctggacttggaagagggcgaaggactggcacgtctaggtgcgccttcacccgagcggcatccgcgagttcaactgaaaaaagattctcgcgaggcgtatgtgccccaacagaacctatttagagacagaagcggcgaggagccggaggagatgcgagcttcccgctttaacgcgggtcgtgagctgcgtcacggtttggaccgaagacgagtgttgcgggacgaggatttcgaagttgatgaaatgacagggatcagtcctgccagggcacacgtggctgcagccaaccttgtatcggcttacgagcagacagtaaaggaagagcgtaacttccaaaagtcttttaataatcatgtgcgaaccctgattgcccgcgaagaagttacccttggtttgatgcatttgtgggatttgatggaagctatcattcagaaccctactagcaaacctctgaccgcccagctgtttctggtggtgcaacacagcagagacaatgaggctttcagagaggcgctgctgaacatcaccgaacccgaggggagatggttgtatgatcttatcaacattctacagagtatcatagtgcaggagcggagcctgggcctggccgagaaggtggctgccatcaattactcggttttgagcttgggaaaatattacgctcgcaaaatctacaagactccatacgttcccatagacaaggaggtgaagatagatgggttctacatgcgcatgacgctcaaggtcttgaccctgagcgatgatcttggggtgtatcgcaatgacagaatgcatcgcgcggttagcgccagcaggaggcgcgagttaagcgacagggaactgatgcacagtttgcaaagagctctgactggagctggaaccgagggtgagaattacttcgacatgggagctgacttgcagtggcagcctagtcgcagggctctgagcgccgcgacggcaggatgtgagcttccttacatagaagaggcggatgaaggcgaggaggaagagggcgagtacttggaagactgatggcacaacccgtgttttttgctagatggaacagcaagcaccggatcccgcaatgcgggcggcgctgcagagccagccgtccggcattaactcctcggacgattggacccaggccatgcaacgtatcatggcgttgacgactcgcaaccccgaagcctttagacagcaaccccaggccaaccgtctatcggccatcatggaagctgtagtgccttcccgctctaatcccactcatgagaaggtcctggccatcgtgaacgcgttggtggagaacaaagctattcgtccagatgaggccggactggtatacaacgctctcttagaacgcgtggctcgctacaacagtagcaatgtgcaaaccaatttggaccgtatgataacagatgtacgcgaagccgtgtctcagcgcgaaaggttccagcgtgatgccaacctgggttcgctggtggcgttaaatgctttcttgagtactcagcctgctaatgtgccgcgtggtcaacaggattatactaactttttaagtgctttgagactgatggtatcagaagtacctcagagcgaagtgtatcagtccggtcctgattacttctttcagactagcagacagggcttgcagacggtaaatctgagccaagcttttaaaaaccttaaaggtttgtggggagtgcatgccccggtaggagaaagagcaaccgtgtctagcttgttaactccgaactcccgcctattattactgttggtagctcctttcaccgacagcggtagcatcgaccgtaattcctatttgggttacctactaaacctgtatcgcgaagccatagggcaaagtcaggtggacgagcagacctatcaagaaattacccaagtcagtcgcgctttgggacaggaagacactggcagtttggaagccactctgaacttcttgcttaccaatcggtctcaaaagatccctcctcaatatgctcttactgcggaggaggagaggatccttagatatgtgcagcagagcgtgggattgtttctgatgcaagagggggcaactccgactgcagcactggacatgacagcgcgaaatatggagcccagcatgtatgccagtaaccgacctttcattaacaaactgctggactacttgcacagagctgccgctatgaactctgattatttcaccaatgccatcttaaacccgcactggctgcccccacctggtttctacacgggcgaatatgacatgcccgaccctaatgacggatttctgtgggacgacgtggacagcgatgttttttcacctctttctgatcatcgcacgtggaaaaaggaaggcggcgatagaatgcattcttctgcatcgctgtccggggtcatgggtgctaccgcggctgagcccgagtctgcaagtccttttcctagtctacccttttctctacacagtgtacgtagcagcgaagtgggtagaataagtcgcccgagtttaatgggcgaagaggagtatctaaacgattccttgctcagaccggcaagagaaaaaaatttcccaaacaatggaatagaaagtttggtggataaaatgagtagatggaagacttatgctcaggatcacagagacgagcctgggatcatggggattacaagtagagcgagccgtagacgccagcgccatgacagacagaggggtcttgtgtgggacgatgaggattcggccgatgatagcagcgtgctggacttgggtgggagaggaaggggcaacccgtttgctcatttgcgccctcgcttgggtggtatgttgtaaaaaaaaataaaaaaaaaactcaccaaggccatggcgacgagcgtacgttcgttcttctttattatctgtgtctagtataatgaggcgagtcgtgctaggcggagcggtggtgtatccggagggtcctcctccttcgtacgagagcgtgatgcagcagcagcaggcgacggcggtgatgcaatccccactggaggctccctttgtgcctccgcgatacctggcacctacggagggcagaaacagcattcgttattcggaactggcacctcagtacgataccaccaggttgtatctggtggacaacaagtcggcggacattgcttctctgaactatcagaatgaccacagcaacttcttgaccacggtggtgcaaaacaatgactttacccctacggaagccagcacccagaccattaactttgatgaacgatcgcggtggggcggtcagctaaagaccatcatgcatactaacatgccaaacgtgaacgagtatatgtttagtaacaagttcaaagcgcgtgtgatggtgtccagaaaacctcccgacggtgctgcagttggggatacttatgatcacaagcaggatattttgaaatatgagtggttcgagtttactttgccagaaggcaacttttcagttactatgactattgatttgatgaacaatgccatcatagataattacttgaaagtgggtagacagaatggagtgcttgaaagtgacattggtgttaagttcgacaccaggaacttcaagctgggatgggatcccgaaaccaagttgatcatgcctggagtgtatacgtatgaagccttccatcctgacattgtcttactgcctggctgcggagtggattttaccgagagtcgtttgagcaaccttcttggtatcagaaaaaaacagccatttcaagagggttttaagattttgtatgaagatttagaaggtggtaatattccggccctcttggatgtagatgcctatgagaacagtaagaaagaacaaaaagccaaaatagaagctgctacagctgctgcagaagctaaggcaaacatagttgccagcgactctacaagggttgctaacgctggagaggtcagaggagacaattttgcgccaacacctgttccgactgcagaatcattattggccgatgtgtctgaaggaacggacgtgaaactcactattcaacctgtagaaaaagatagtaagaatagaagctataatgtgttggaagacaaaatcaacacagcctatcgcagttggtatctttcgtacaattatggcgatcccgaaaaaggagtgcgttcctggacattgctcaccacctcagatgtcacctgcggagcagagcaggtctactggtcgcttccagacatgatgaaggatcctgtcactttccgctccactagacaagtcagtaactaccctgtggtgggtgcagagcttatgcccgtcttctcaaagagcttctacaacgaacaagctgtgtactcccagcagctccgccagtccacctcgcttacgcacgtcttcaaccgctttcctgagaaccagattttaatccgtccgccggcgcccaccattaccaccgtcagtgaaaacgttcctgctctcacagatcacgggaccctgccgttgcgcagcagtatccggggagtccaacgtgtgaccgttactgacgccagacgccgcacctgtccctacgtgtacaaggcactgggcatagtcgcaccgcgcgtcctttcaagccgcactttctaaaaaaaaaaaaaatgtccattcttatctcgcccagtaataacaccggttggggtctgcgcgctccaagcaagatgtacggaggcgcacgcaaacgttctacccaacatcctgtccgtgttcgcggacattttcgcgctccatggggcgccctcaagggccgcactcgcgttcgaaccaccgtcgatgatgtaatcgatcaggtggttgccgacgcccgtaattatactcctactgcgcctacatctactgtggatgcagttattgacagtgtagtggctgacgctcgcaactatgctcgacgtaagagccggcgaaggcgcattgccagacgccaccgagctaccactgccatgcgagccgcaagagctctgctacgaagagctagacgcgtggggcgaagagccatgcttagggcggccagacgtgcagcttcgggcgccagcgccggcaggtcccgcaggcaagcagccgctgtcgcagcggcgactattgccgacatggcccaatcgcgaagaggcaatgtatactgggtgcgtgacgctgccaccggtcaacgtgtacccgtgcgcacccgtccccctcgcacttagaagatactgagcagtctccgatgttgtgtcccagcggcgaggatgtccaagcgcaaatacaaggaagaaatgctgcaggttatcgcacctgaagtctacggccaaccgttgaaggatgaaaaaaaaccccgcaaaatcaagcgggttaaaaaggacaaaaaagaagaggaagatggcgatgatgggctggcggagtttgtgcgcgagtttgccccacggcgacgcgtgcaatggcgtgggcgcaaagttcgacatgtgttgagacctggaacttcggtggtctttacacccggcgagcgttcaagcgctacttttaagcgttcctatgatgaggtgtacggggatgatgatattcttgagcaggcggctgaccgattaggcgagtttgcttatggcaagcgtagtagaataacttccaaggatgagacagtgtcgatacccttggatcatggaaatcccacccctagtcttaaaccggtcactttgcagcaagtgttacccgtaactccgcgaacaggtgttaaacgcgaaggtgaagatttgtatcccactatgcaactgatggtacccaaacgccagaagttggaggacgttttggagaaagtaaaagtggatccagatattcaacctgaggttaaagtgagacccattaagcaggtagcgcctggtctgggggtacaaactgtagacattaagattcccactgaaagtatggaagtgcaaactgaacccgcaaagcctactgccacctccactgaagtgcaaacggatccatggatgcccatgcctattacaactgacgccgccggtcccactcgaagatcccgacgaaagtacggtccagcaagtctgttgatgcccaattatgttgtacacccatctattattcctactcctggttaccgaggcactcgctactatcgcagccgaaacagtacctcccgccgtcgccgcaagacacctgcaaatcgcagtcgtcgccgtagacgcacaagcaaaccgactcccggcgccctggtgcggcaagtgtaccgcaatggtagtgcggaacctttgacactgccgcgtgcgcgttaccatccgagtatcatcacttaatcaatgttgccgctgcctccttgcagatatggccctcacttgtcgccttcgcgttcccatcactggttaccgaggaagaaactcgcgccgtagaagagggatgttgggacgcggaatgcgacgctacaggcgacggcgtgctatccgcaagcaattgcggggtggttttttaccagccttaattccaattatcgctgctgcaattggcgcgataccaggcatagcttccgtggcggttcaggcctcgcaacgacattgacattggaaaaaaacgtataaataaaaaaaaaaaaatacaatggactctgacactcctggtcctgtgactatgttttcttagagatggaagacatcaatttttcatccttggctccgcgacacggcacgaagccgtacatgggcacctggagcgacatcggcacgagccaactgaacgggggcgccttcaattggagcagtatctggagcgggcttaaaaattttggctcaaccataaaaacatacgggaacaaagcttggaacagcagtacaggacaggcgcttagaaataaacttaaagaccagaacttccaacaaaaagtagtcgatgggatagcttccggcatcaatggagtggtagatttggctaaccaggctgtgcagaaaaagataaacagtcgtttggacccgccgccagcaaccccaggtgaaatgcaagtggaggaagaaattcctccgccagaaaaacgaggcgacaagcgtccgcgtcccgatttggaagagacgctggtgacgcgcgtagatgaaccgccttcttatgaggaagcaacgaagcttggaatgcccaccactagaccgatagccccaatggccaccggggtgatgaaaccttctcagttgcatcgacccgtcaccttggatttgccccctccccctgctgctactgctgtacccgcttctaagcctgtcgctgccccgaaaccagtcgccgtagccaggtcacgtcccgggggcgctcctcgtccaaatgcgcactggcaaaatactctgaacagcatcgtgggtctaggcgtgcaaagtgtaaaacgccgtcgctgcttttaattaaatatggagtagcgcttaacttgcctatctgtgtatatgtgtcattacacgccgtcacagcagcagaggaaaaaaggaagaggtcgtgcgtcgacgctgagttactttcaagatggccaccccatcgatgctgccccaatgggcatacatgcacatcgccggacaggatgcttcggagtacctgagtccgggtctggtgcagttcgcccgcgccacagacacctacttcaatctgggaaataagtttagaaatcccaccgtagcgccgacccacgatgtgaccaccgaccgtagccagcggctcatgttgcgcttcgtgcccgttgaccgggaggacaatacatactcttacaaagtgcggtacaccctggccgtgggcgacaacagagtgctggatatggccagcacgttctttgacattaggggtgtgttggacagaggtcccagtttcaaaccctattctggtacggcttacaactccctggctcctaaaggcgctccaaatacatctcagtggattgcagaaggtgtaaaaaatacaactggtgaggaacacgtaacagaagaggaaaccaatactactacttacacttttggcaatgctcctgtaaaagctgaagctgaaattacaaaagaaggactcccagtaggtttggaagtttcagatgaagaaagtaaaccgatttatgctgataaaacatatcagccagaacctcagctgggagatgaaacttggactgaccttgatggaaaaaccgaaaagtatggaggcagggctctcaaacccgatactaagatgaaaccatgctacgggtcctttgccaaacctactaatgtgaaaggcggtcaggcaaaacaaaaaacaacggagcagccaaatcagaaagtcgaatatgatatcgacatggagttttttgatgcggcatcgcagaaaacaaacttaagtcctaaaattgtcatgtatgcagaaaatgtaaatttggaaactccagacactcatgtagtgtacaaacctggaacagaagacacaagttccgaagctaatttgggacaacaatctatgcccaacagacccaactacattggcttcagagataactttattggacttatgtactataacagtactggtaacatgggggtgctggctggtcaagcgtctcagttaaatgcagtggttgacttgcaggacagaaacacagaactttcttaccaactcttgcttgactctctgggcgacagaaccagatactttagcatgtggaatcaggctgtggacagttatgatcctgatgtacgtgttattgaaaatcatggtgtggaagatgaacttcccaactactgttttccactggacggcataggtgttccaacaaccagttacaaatcaatagttccaaatggagacaatgcgcctaattggaaggaacctgaagtaaatggaacaagtgagatcggacagggtaatttgtttgccatggaaattaaccttcaagccaatctatggcgaagtttcctttattccaatgtggctctatatctcccagactcgtacaaatacaccccgtccaatgtcactcttccagaaaacaaaaacacctacgactacatgaacgggcgggtggtgccgccatctctagtagacacctatgtgaacattggtgccaggtggtctctggatgccatggacaatgtcaacccattcaaccaccaccgtaacgctggcttgcgttaccgatccatgcttctgggtaacggacgttatgtgcctttccacatacaagtgcctcaaaaattcttcgctgttaaaaacctgctgcttctcccaggctcctacacttatgagtggaactttaggaaggatgtgaacatggttctacagagttccctcggtaacgacctgcgggtagatggcgccagcatcagtttcacgagcatcaacctctatgctacttttttccccatggctcacaacaccgcttccacccttgaagccatgctgcggaatgacaccaatgatcagtcattcaacgactacctatctgcagctaacatgctctaccccattcctgccaatgcaaccaatattcccatttccattccttctcgcaactgggcggctttcagaggctggtcatttaccagactgaaaaccaaagaaactccctctttggggtctggatttgacccctactttgtctattctggttctattccctacctggatggtaccttctacctgaaccacacttttaagaaggtttccatcatgtttgactcttcagtgagctggcctggaaatgacaggttactatctcctaacgaatttgaaataaagcgcactgtggatggcgaaggctacaacgtagcccaatgcaacatgaccaaagactggttcttggtacagatgctcgccaactacaacatcggctatcagggcttctacattccagaaggatacaaagatcgcatgtattcatttttcagaaacttccagcccatgagcaggcaggtggttgatgaggtcaattacaaagacttcaaggccgtcgccataccctaccaacacaacaactctggctttgtgggttacatggctccgaccatgcgccaaggtcaaccctatcccgctaactatccctatccactcattggaacaactgccgtaaatagtgttacgcagaaaaagttcttgtgtgacagaaccatgtggcgcataccgttctcgagcaacttcatgtctatgggggcccttacagacttgggacagaatatgctctatgccaactcagctcatgctctggacatgacctttgaggtggatcccatggatgagcccaccctgctttatcttctcttcgaagttttcgacgtggtcagagtgcatcagccacaccgcggcatcatcgaggcagtctacctgcgtacaccgttctcggccggtaacgctaccacgtaagaagcttcttgcttcttgcaaatagcagctgcaaccatggcctgcggatcccaaaacggctccagcgagcaagagctcagagccattgtccaagacctgggttgcggaccctattttttgggaacctacgataagcgcttcccggggttcatggcccccgataagctcgcctgtgccattgtaaatacggccggacgtgagacggggggagagcactggttggctttcggttggaacccacgttctaacacctgctacctttttgatccttttggattctcggatgatcgtctcaaacagatttaccagtttgaatatgagggtctcctgcgccgcagcgctcttgctaccaaggaccgctgtattacgctggaaaaatctacccagaccgtgcagggtccccgttctgccgcctgcggacttttctgctgcatgttccttcacgcctttgtgcactggcctgaccgtcccatggacggaaaccccaccatgaaattgctaactggagtgccaaacaacatgcttcattctcctaaagtccagcccaccctgtgtgacaatcaaaaagcactctaccattttcttaatacccattcgccttattttcgctcccatcgtacacacatcgaaagggccactgcgttcgaccgtatggatgttcaataatgactcatgtaaacaacgtgttcaataaacatcactttatttttttacatgtatcaaggctctgcattacttatttatttacaagtcgaatgggttctgacgagaatcagaatgacccgcaggcagtgatacgttgcggaactgatacttgggttgccacttgaattcgggaatcaccaacttgggaaccggtatatcgggcaggatgtcactccacagctttctggtcagctgcaaagctccaagcaggtcaggagccgaaatcttgaaatcacaattaggaccagtgctttgagcgcgagagttgcggtacaccggattgcagcactgaaacaccatcagcgacggatgtctcacgcttgccagcacggtgggatctgcaatcatgcccacatccagatcttcagcattggcaatgctgaacggggtcatcttgcaggtctgcctacccatggcgggcacccaattaggcttgtggttgcaatcgcagtgcagggggatcagtatcatcttggcctgatcctgtctgattcctggatacacggctctcatgaaagcatcatattgcttgaaagcctgctgggctttactaccctcggtataaaacatcccgcaggacctgctcgaaaactggttagctgcacagccggcatcattcacacagcagcgggcgtcattgttagctatttgcaccacacttctgccccagcggttttgggtgattttggttcgctcgggattctcctttaaggctcgttgtccgttctcgctggccacatccatctcgataatctgctccttctgaatcataatattgccatgcaggcacttcagcttgccctcataatcattgcagccatgaggccacaacgcacagcctgtacattcccaattatggtgggcgatctgagaaaaagaatgtatcattccctgcagaaatcttcccatcatcgtgctcagtgtcttgtgactagtgaaagttaactggatgcctcggtgctcctcgtttacgtactggtgacagatgcgcttgtattgttcgtgttgctcaggcattagtttaaaagaggttctaagttcgttatccagcctgtacttctccatcagcagacacatcacttccatgcctttctcccaagcagacaccaggggcaagctaatcggattcttaacagtgcaggcagcagctcctttagccagagggtcatctttagcgatcttctcaatgcttcttttgccatccttctcaacgatgcgcacgggcgggtagctgaaacccactgctacaagttgcgcctcttctctttcttcttcgctgtcttgactgatgtcttgcatggggatatgtttggtcttccttggcttctttttggggggtatcggaggaggaggactgtcgctccgttccggagacagggaggattgtgacgtttcgctcaccattaccaactgactgtcggtagaagaacctgaccccacacggcgacaggtgtttctcttcgggggcagaggtggaggcgattgcgaagggctgcggtccgacctggaaggcggatgactggcagaaccccttccgcgttcgggggtgtgctccctgtggcggtcgcttaactgatttccttcgcggctggccattgtgttctcctaggcagagaaacaacagacatggaaactcagccattgctgtcaacatcgccacgagtgccatcacatctcgtcctcagcgacgaggaaaaggagcagagcttaagcattccaccgcccagtcctgccaccacctctaccctagaagataaggaggtcgacgcatctcatgacatgcagaataaaaaagcgaaagagtctgagacagacatcgagcaagacccgggctatgtgacaccggtggaacacgaggaagagttgaaacgctttctagagagagaggatgaaaactgcccaaaacaacgagcagataactatcaccaagatgctggaaatagggatcagaacaccgactacctcatagggcttgacggggaagacgcgctccttaaacatctagcaagacagtcgctcatagtcaaggatgcattattggacagaactgaagtgcccatcagtgtggaagagctcagccgcgcctacgagcttaacctcttttcacctcgtactccccccaaacgtcagccaaacggcacctgcgagccaaatcctcgcttaaacttttatccagcttttgctgtgccagaagtactggctacctatcacatcttttttaaaaatcaaaaaattccagtctcctgccgcgctaatcgcacccgcgccgatgccctactcaatctgggacctggttcacgcttacctgatatagcttccttggaagaggttccaaagatcttcgagggtctgggcaataatgagactcgggccgcaaatgctctgcaaaagggagaaaatggcatggatgagcatcacagcgttctggtggaattggaaggcgataatgccagactcgcagtactcaagcgaagcatcgaggtcacacacttcgcatatcccgctgtcaacctgccccctaaagtcatgacggcggtcatggaccagttactcattaagcgcgcaagtcccctttcagaagacatgcatgacccagatgcctgtgatgagggtaaaccagtggtcagtgatgagcagctaacccgatggctgggcaccgactctcccagggatttggaagagcgtcgcaagcttatgatggccgtggtgctggttaccgtagaactagagtgtctccgacgtttctttaccgattcagaaaccttgcgcaaactcgaagagaatctgcactacacttttagacacggctttgtgcggcaggcatgcaagatatctaacgtggaactcaccaacctggtttcctacatgggtattctgcatgagaatcgcctaggacaaagcgtgctgcacagcaccctgaagggggaagcccgccgtgattacatccgcgattgtgtctatctgtacctgtgccacacgtggcaaaccggcatgggtgtatggcagcaatgtttagaagaacagaacttgaaagagcttgacaagctcttacagaaatctcttaaggttctgtggacagggttcgacgagcgcaccgtcgcttccgacctggcagacctcatcttcccagagcgtctcagggttactttgcgaaacggattgcctgactttatgagccagagcatgcttaacaattttcgctctttcatcctggaacgctccggtatcctgcccgccacctgctgcgcactgccctccgactttgtgcctctcacctaccgcgagtgccccccgccgctatggagtcactgctacctgttccgtctggccaactatctctcctaccactcggatgtgatcgaggatgtgagcggagacggcttgctggagtgtcactgccgctgcaatctgtgcacgccccaccggtccctagcttgcaacccccagttgatgagcgaaacccagataataggcacctttgaattgcaaggccccagcagccaaggcgatgggtcttctcctgggcaaagtttaaaactgaccccgggactgtggacctccgcctacttgcgcaagtttgctccggaagattaccacccctatgaaatcaagttctatgaggaccaatcacagcctccaaaggccgaactttcggcctgcgtcatcacccagggggcaattctggcccaattgcaagccatccaaaaatcccgccaagaatttctactgaaaaagggtaagggggtctaccttgacccccagaccggcgaggaactcaacacaaggttccctcaggatgtcccaacgacgagaaaacaagaagttgaaggtgcagccgccgcccccagaagatatggaggaagattgggacagtcaggcagaggaggcggaggaggacagtctggaggacagtctggaggaagacagtttggaggaggaaaacgaggaggcagaggaggtggaagaagtaaccgccgacaaacagttatcctcggctgcggagacaagcaacagcgctaccatctccgctccgagtcgaggaacccggcggcgtcccagcagtagatgggacgagaccggacgcttcccgaacccaaccagcgcttccaagaccggtaagaaggatcggcagggatacaagtcctggcgggggcataagaatgccatcatctcctgcttgcatgagtgcgggggcaacatatccttcacgcggcgctacttgctattccaccatggggtgaactttccgcgcaatgttttgcattactaccgtcacctccacagcccctactatagccagcaaatcccggcagtctcgacagataaagacagcggcggcgacctccaacagaaaaccagcagcggcagttagaaaatacacaacaagtgcagcaacaggaggattaaagattacagccaacgagccagcgcaaacccgagagttaagaaatcggatctttccaaccctgtatgccatcttccagcagagtcggggtcaagagcaggaactgaaaataaaaaaccgatctctgcgttcgctcaccagaagttgtttgtatcacaagagcgaagatcaacttcagcgcactctcgaggacgccgaggctctcttcaacaagtactgcgcgctgactcttaaagagtaggcagcgaccgcgcttattcaaaaaaggcgggaattacatcatcctcgacatgagtaaagaaattcccacgccttacatgtggagttatcaaccccaaatgggattggcggcaggcgcctcccaggactactccacccgcatgaattggctcagcgccgggccttctatgatttctcgagttaatgatatacgcgcctaccgaaaccaaatacttttggaacagtcagctcttaccaccacgccccgccaacaccttaatcccagaaattggcccgccgccctagtgtaccaggaaagtcccgctcccaccactgtattacttcctcgagacgcccaggccgaagtccaaatgactaatgcaggtgcgcagttagctggcggctccaccctatgtcgtcacaggcctcggcataatataaaacgcctgatgatcagaggccgaggtatccagctcaacgacgagtcggtgagctctccgcttggtctacgaccagacggaatctttcagattgccggctgcgggagatcttccttcacccctcgtcaggctgttctgactttggaaagttcgtcttcgcaaccccgctcgggcggaatcgggaccgttcaatttgtggaggagtttactccctctgtctacttcaaccccttctccggatctcctgggcattacccggacgagttcataccgaacttcgacgcgattagcgagtcagtggacggctacgattgatgtctggtgacgcggctgagctatctcggctgcgacatctagaccactgccgccgctttcgctgctttgcccgggaactcattgagttcatctacttcgaactccccaaggatcaccctcaaggtccggcccacggagtgcggatttctatcgaaggcaaaatagactctcgcctgcaacgaattttctcccagcggcccgtgctgatcgagcgagaccagggaaacaccacggtttccatctactgcatttgtaatcaccccggattgcatgaaagcctttgctgtcttatgtgtactgagtttaataaaaactgaattaagactctcctacggactgccgcttcttcaacccggattttacaaccagaagaacgaaacttttcctgtcgtccaggactctgttaacttcacctttcctactcacaaactagaagctcaacgactacaccgcttttccagaagcattttccctactaatactactttcaaaaccggaggtgagctccaaggtcttcctacagaaaacccttgggtggaagcgggccttgtagtgctaggaattcttgcgggtgggcttgtgattattctttgctacctatacacaccttgcttcactttcttagtggtgttgtggtattggtttaaaaaatggggcccatactagtcttgcttgttttactttcgcttttggaaccgggttctgccaattacgatccatgtctagacttcgacccagaaaactgcacacttacttttgcacccgacacaagccgcatctgtggagttcatcgcctctcttacgaacttggcccccaacgacaaaaatttacctgcatggtgggaatcaaccccatagttatcacccagcaaagtggagatactaagggttgcattcactgctcctgcgattccatcgagtgcacctacaccctgctgaagaccctatgcggcctaagagacctgctaccaatgaattaaaaaatgattaataaaaaatcacttacttgaaatcagcaataaggtctctgttgaaattttctcccagcagcacctcacttccctcttcccaactctggtattctaaaccccgttcagcggcatactttctccatactttaaaggggatgtcaaattttagctcctctcctgtacccacaatcttcatgtctttcttcccagatgaccaagagagtccggctcagtgactccttcaaccctgtctacccctatgaagatgaaagcacctcccaacacccctttataaacccagggtttatttccccaaatggcttcacacaaagcccaaacggagttcttactttaaaatgtttaaccccactaacaaccacaggcggatctctacagctaaaagtgggagggggacttacagtggatgacaccaacggttttttgaaagaaaacataagtgccaccacaccactcgttaagactggtcactctataggtttaccactaggagccggattgggaacgaatgaaaataaactttgtatcaaattaggacaaggacttacattcaattcaaacaacatttgcattgatgacaatattaacaccttatggacaggagtcaaccccaccgaagccaactgtcaaatcatgaactccagtgaatctaatgattgcaaattaattctaacactagttaaaactggagcactagtcactgcatttgtttatgttataggagtatctaacaattttaatatgctaactacacacagaaatataaattttactgcagagctgtttttcgattctactggtaatttactaactagactctcatccctcaaaactccacttaatcataaatcaggacaaaacatggctactggtgccattactaatgctaaaggtttcatgcccagcacgactgcctatcctttcaatgataattctagagaaaaagaaaactacatttacggaacttgttactacacagctagtgatcgcactgcttttcccattgacatatctgtcatgcttaaccgaagagcaataaatgacgagacatcatattgtattcgtataacttggtcctggaacacaggagatgccccagaggtgcaaacctctgctacaaccctagtcacctccccatttaccttttactacatcagagaagacgactgacaaataaagtttgcgatcgccaggccaccatgggatggagctgtatcatcctcttcttggtagcaacagctacaggtgtccactccgaagtgcaactggtggagtctggcggaggtctggtgcagcctggaggctctctcagactgtcatgcgctgcaagcggttttaccatctctgactactggatccattgggtgcgtcaggctcctggaaaaggccttgagtgggttgcgggtataactccagcaggcgggtacacctactacgccgatagcgttaaaggccgctttaccattagcgcggacaccagcaagaataccgcctatctgcagatgaactcactgagagcggaggatacagcagtgtactattgcgcaagattcgtgttctttctgccatacgctatggactattggggccaagggacactggttacagtatcctcgggtggcggtggctcgggcggtggtggatctggtggcggcggatctgacatccagatgacccagagcccatcaagtctgtccgccagcgttggcgatcgagtcaccattacttgtagggcttctcaggacgtgtctacagctgttgcttggtatcagcagaaaccagggaaagcacccaaacttctgatctactcagcttccttcctgtactcaggagttcctagtcggtttagtggcagcggcagtggcacagacttcacgctcaccattagcagtctccagcctgaggattttgccacttactactgtcagcaagggtatggaaatcccttcacattcgggcaaggaaccaaagtcgagattaagaggcatcatcaccaccaccattaagctagcttgactgactgagatacagcgtaccttcagctcacagacatgataagatacattgatgagtttggacaaaccacaactagaatgcagtgaaaaaaatgctttatttgtgaaatttgtgatgctattgctttatttgtaaccattataagctgcaataaacaagttaacaacaacaattgcattcattttatgtttcaggttcagggggaggtgtgggaggttttttaaagcaagtaaaacctctacaaatgtggtagtcgtcagctatcctgcaggaacttgtttatttgaaaatcaattcacaaaatccgagtagttattttgcctcccccttcccatttaacagaatacaccaatctctccccacgcacagctttaaacatttggataccattagatatagacatggttttagattccacattccaaacagtttcagagcgagccaatctggggtcagtgatagataaaaatccatcgggatagtcttttaaagcgctttcacagtccaactgctgcggatgcgactccggagtctggatcacggtcatctggaagaagaacgatgggaatcataatccgaaaacggtatcggacgattgtgtctcatcaaacccacaagcagccgctgtctgcgtcgctccgtgcgactgctgtttatgggatcagggtccacagtgtcctgaagcatgattttaatagcccttaacatcaactttctggtgcgatgcgcgcagcaacgcattctgatttcactcaaatctttgcagtaggtacaacacattattacaatattgtttaataaaccataattaaaagcgctccagccaaaactcatatctgatataatcgcccctgcatgaccatcataccaaagtttaatataaattaaatgacgttccctcaaaaacacactacccacatacatgatctcttttggcatgtgcatattaacaatctgtctgtaccatggacaacgttggttaatcatgcaacccaatataaccttccggaaccacactgccaacaccgctcccccagccatgcattgaagtgaaccctgctgattacaatgacaatgaagaacccaattctctcgaccgtgaatcacttgagaatgaaaaatatctatagtggcacaacatagacataaatgcatgcatcttctcataatttttaactcctcaggatttagaaacatatcccagggaataggaagctcttgcagaacagtaaagctggcagaacaaggaagaccacgaacacaacttacactatgcatagtcatagtatcacaatctggcaacagcgggtggtcttcagtcatagaagctcgggtttcattttcctcacaacgtggtaactgggctctggtgtaagggtgatgtctggcgcatgatgtcgagcgtgcgcgcaaccttgtcataatggagttgcttcctgacattctcgtattttgtatagcaaaacgcggccctggcagaacacactcttcttcgccttctatcctgccgcttagcgtgttccgtgtgatagttcaagtacaaccacactcttaagttggtcaaaagaatgctggcttcagttgtaatcaaaactccatcgcatctaatcgttctgaggaaatcatccaagcaatgcaactggattgtgtttcaagcaggagaggagagggaagagacggaagaaccatgttaatttttattccaaacgatctcgcagtacttcaaattgtagatcgcgcagatggcatctctcgcccccactgtgttggtgaaaaagcacagctagatcaaaagaaatgcgattttcaaggtgctcaacggtggcttccagcaaagcctccacgcgcacatccaagaacaaaagaataccaaaagaaggagcattttctaactcctcaatcatcatattacattcctgcaccattcccagataattttcagctttccagccttgaattattcgtgtcagttcttgtggtaaatccaatccacacattacaaacaggtcccggagggcgccctccaccaccattcttaaacacaccctcataatgacaaaatatcttgctcctgtgtcacctgtagcgaattgagaatggcaacatcaattgacatgcccttggctctaagttcttctttaagttctagttgtaaaaactctctcatattatcaccaaactgcttagccagaagccccccgggaacaagagcaggggacgctacagtgcagtacaagcgcagacctccccaattggctccagcaaaaacaagattggaataagcatattgggaaccgccagtaatatcatcgaagttgctggaaatataatcaggcagagtttcttgtaaaaattgaataaaagaaaaatttgccaaaaaaacattcaaaacctctgggatgcaaatgcaataggttaccgcgctgcgctccaacattgttagttttgaattagtctgcaaaaataaaaaaaaaaacaagcgtcatatcatagtagcctgacgaacagatggataaatcagtctttccatcacaagacaagccacagggtctccagctcgaccctcgtaaaacctgtcatcatgattaaacaacagcaccgaaagttcctcgcggtgaccagcatgaataattcttgatgaagcatacaatccagacatgttagcatcagttaacgagaaaaaacagccaacatagcctttgggtataattatgcttaatcgtaagtatagcaaagccacccctcgcggatacaaagtaaaaggcacaggagaataaaaaatataattatttctctgctgctgttcaggcaacgtcgcccccggtccctctaaatacacatacaaagcctcatcagccatggcttaccagacaaagtacagcgggcacacaaagcacaagctctaaagtgactctccaacctctccacaatatatatatacacaagccctaaactgacgtaatgggagtaaagtgtaaaaaatcccgccaaacccaacacacaccccgaaactgcgtcaccagggaaaagtacagtttcacttccgcaatcccaacaggcgtaacttcctctttctcacggtacgtgatatcccactaacttgcaacgtcattttcccacggtcgcaccgccccttttagccgttaaccccacagccaatcaccacacgatccacactttttaaaatcacctcatttacatattggcaccattccatctataaggtatattatatagataga

SEQ ID NO: 49 - DNA, 33765 bp, Artificial Sequence
  NG-95 virus genome sequence consisting of a transgene cassette that encodes the cytokine, IFN?, inserted in the region BY.
tctatctatataatataccttatagatggaatggtgccaatatgtaaatgaggtgattttaaaaagtgtggatcgtgtggtgattggctgtggggttaacggctaaaaggggcggtgcgaccgtgggaaaatgacgttttgtgggggtggagtttttttgcaagttgtcgcgggaaatgtgacgcataaaaaggcttttttctcacggaactacttagttttcccacggtatttaacaggaaatgaggtagttttgaccggatgcaagtgaaaattgttgattttcgcgcgaaaactgaatgaggaagtgtttttctgaataatgtggtatttatggcagggtggagtatttgttcagggccaggtagactttgacccattacgtggaggtttcgattaccgtgttttttacctgaatttccgcgtaccgtgtcaaagtcttctgtttttacgtaggtgtcagctgatcgctagggtatttatacctcagggtttgtgtcaagaggccactcttgagtgccagcgagaagagttttctcctctgcgccggcagtttaataataaaaaaatgagagatttgcgatttctgcctcaggaaataatctctgctgagactggaaatgaaatattggagcttgtggtgcacgccctgatgggagacgatccggagccacctgtgcagctttttgagcctcctacgcttcaggaactgtatgatttagaggtagagggatcggaggattctaatgaggaagctgtaaatggcttttttaccgattctatgcttttagctgctaatgaagggttagaattagatccgcctttggacacttttgatactccaggggtaattgtggaaagcggtacaggtgtaagaaaattacctgatttgagttccgtggactgtgatttgcactgctatgaagacgggtttcctccgagtgatgaggaggaccatgaaaaggagcagtccatgcagactgcagcgggtgagggagtgaaggctgccaatgttggttttcagttggattgcccggagcttcctggacatggctgtaagtcttgtgaatttcacaggaaaaatactggagtaaaggaactgttatgttcgctttgttatatgagaacgcactgccactttatttacagtaagtgtgtttaagttaaaatttaaaggaatatgctgtttttcacatgtatattgagtgtgagttttgtgcttcttattataggtcctgtgtctgatgctgatgaatcaccatctcctgattctactacctcacctcctgagattcaagcacctgttcctgtggacgtgcgcaagcccattcctgtgaagcttaagcctgggaaacgtccagcagtggaaaaacttgaggacttgttacagggtggggacggacctttggacttgagtacacggaaacgtccaagacaataagtgttccatatccgtgtttacttaaggtgacgtcaatatttgtgtgacagtgcaatgtaataaaaatatgttaactgttcactggtttttattgctttttgggcggggactcaggtatataagtagaagcagacctgtgtggttagctcataggagctggctttcatccatggaggtttgggccattttggaagaccttaggaagactaggcaactgttagagaacgcttcggacggagtctccggtttttggagattctggttcgctagtgaattagctagggtagtttttaggataaaacaggactataaacaagaatttgaaaagttgttggtagattgcccaggactttttgaagctcttaatttgggccatcaggttcactttaaagaaaaagttttatcagttttagacttttcaaccccaggtagaactgctgctgctgtggcttttcttacttttatattagataaatggatcccgcagactcatttcagcaggggatacgttttggatttcatagccacagcattgtggagaacatggaaggttcgcaagatgaggacaatcttaggttactggccagtgcagcctttgggtgtagcgggaatcctgaggcatccaccggtcatgccagcggttctggaggaggaacagcaagaggacaacccgagagccggcctggaccctccagtggaggaggcggagtagctgacttgtctcctgaactgcaacgggtgcttactggatctacgtccactggacgggataggggcgttaagagggagagggcatctagtggtactgatgctagatctgagttggctttaagtttaatgagtcgcagacgtcctgaaaccatttggtggcatgaggttcagaaagagggaagggatgaagtttctgtattgcaggagaaatattcactggaacaggtgaaaacatgttggttggagcctgaggatgattgggaggtggccattaaaaattatgccaagatagctttgaggcctgataaacagtataagattactagacggattaatatccggaatgcttgttacatatctggaaatggggctgaggtggtaatagatactcaagacaaggcagttattagatgctgcatgatggatatgtggcctggggtagtcggtatggaagcagtaacttttgtaaatgttaagtttaggggagatggttataatggaatagtgtttatggccaataccaaacttatattgcatggttgtagcttttttggtttcaacaatacctgtgtagatgcctggggacaggttagtgtacggggatgtagtttctatgcgtgttggattgccacagctggcagaaccaagagtcaattgtctctgaagaaatgcatatttcaaagatgtaacctgggcattctgaatgaaggcgaagcaagggtccgccactgcgcttctacagatactggatgttttattttgattaagggaaatgccagcgtaaagcataacatgatttgcggtgcttccgatgagaggccttatcaaatgctcacttgtgctggtgggcattgtaatatgctggctactgtgcatattgtttcccatcaacgcaaaaaatggcctgtttttgatcacaatgtgatgacgaagtgtaccatgcatgcaggtgggcgtagaggaatgtttatgccttaccagtgtaacatgaatcatgtgaaagtgttgttggaaccagatgccttttccagaatgagcctaacaggaatttttgacatgaacatgcaaatctggaagatcctgaggtatgatgatacgagatcgagggtacgcgcatgcgaatgcggaggcaagcatgccaggttccagccggtgtgtgtagatgtgactgaagatctcagaccggatcatttggttattgcccgcactggagcagagttcggatccagtggagaagaaactgactaaggtgagtattgggaaaactttggggtgggattttcagatggacagattgagtaaaaatttgttttttctgtcttgcagctgtcatgagtggaaacgcttcttttaaggggggagtcttcagcccttatctgacagggcgtctcccatcctgggcaggagttcgtcagaatgttatgggatctactgtggatggaagacccgtccaacccgccaattcttcaacgctgacctatgctactttaagttcttcacctttggacgcagctgcagctgccgccgccgcttctgttgccgctaacactgtgcttggaatgggttactatggaagcatcatggctaattccacttcctctaataacccttctaccctgactcaggacaagttacttgtccttttggcccagctggaggctttgacccaacgtctgggtgaactttctcagcaggtggtcgagttgcgagtacaaactgagtctgctgtcggcacggcaaagtctaaataaaaaaatcccagaatcaatgaataaataaacaagcttgttgttgatttaaaatcaagtgtttttatttcatttttcgcgcacggtatgccctagaccaccgatctctatcattgagaactcggtggattttttccaggatcctatagaggtgggattgaatgtttagatacatgggcattaggccgtctttggggtggagatagctccattgaagggattcatgctccggggtagtgttgtaaatcacccagtcataacaaggtcgcagtgcatggtgttgcacaatatcttttagaagtaggctgattgccacagataagcccttggtgtaggtgtttacaaaccggttgagctgggatgggtgcattcggggtgaaattatgtgcattttggattggatttttaagttggcaatattgccgccaagatcccgtcttgggttcatgttatgaaggaccaccaagacggtgtatccggtacatttaggaaatttatcgtgcagcttggatggaaaagcgtggaaaaatttggagacacccttgtgtcctccaagattttccatgcactcatccatgataatagcaatggggccgtgggcagcggcgcgggcaaacacgttccgtgggtctgacacatcatagttatgttcctgagttaaatcatcataagccattttaatgaatttggggcggagagtaccagattggggtatgaatgttccttcgggccccggagcatagttcccctcacagatttgcatttcccaagctttcagttccgagggtggaatcatgtccacctggggggctatgaaaaacaccgtttctggggcgggggtgattaattgtgatgatagcaaatttctgagcaattgagatttgccacatccggtggggccataaatgattccgattacgggttgcaggtggtagtttagggaacggcaactgccgtcttctcgaagcaagggggccacctcgttcatcatttcccttacatgcatattttcccgcaccaaatccattaggaggcgctctcctcctagtgatagaagttcttgtagtgaggaaaagtttttcagcggtttcagaccgtcagccatgggcattttggagagagtttgctgcaaaagttctagtctgttccacagttcagtgatgtgttctatggcatctcgatccagcagacctcctcgtttcgcgggtttggacggctcctggaatagggtatgagacgatgggcgtccagcgctgccagggttcggtccttccagggtctcagtgttcgagtcagggttgtttccgtcacagtgaaggggtgtgcgcctgcttgggcgcttgccagggtgcgcttcagactcatcctgctggtcgaaaacttctgtcgcttggcgccctgtatgtcggccaagtagcagtttaccatgagttcgtagttgagcgcctcggctgcgtggcctttggcgcggagcttacctttggaagttttcttgcataccgggcagtataggcatttcagcgcatacaacttgggcgcaaggaaaacggattctggggagtatgcatctgcgccgcaggaggcgcaaacagtttcacattccaccagccaggttaaatccggttcattggggtcaaaaacaagttttccgccatattttttgatgcgtttcttacctttggtctccatgagttcgtgtcctcgttgagtgacaaacaggctgtccgtgtccccgtagactgattttacaggcctcttctccagtggagtgcctcggtcttcttcgtacaggaactctgaccactctgatacaaaggcgcgcgtccaggccagcacaaaggaggctatgtgggaggggtagcgatcgttgtcaaccagggggtccaccttttccaaagtatgcaaacacatgtcaccctcttcaacatccaggaatgtgattggcttgtaggtgtatttcacgtgacctggggtccccgctgggggggtataaaagggggcggttctttgctcttcctcactgtcttccggatcgctgtccaggaacgtcagctgttggggtaggtattccctctcgaaggcgggcatgacctctgcactcaggttgtcagtttctaagaacgaggaggatttgatattgacagtgccggttgagatgcctttcatgaggttttcgtccatctggtcagaaaacacaatttttttattgtcaagtttggtggcaaatgatccatacagggcgttggataaaagtttggcaatggatcgcatggtttggttcttttccttgtccgcgcgctctttggcggcgatgttgagttggacatactcgcgtgccaggcacttccattcggggaagatagttgttaattcatctggcacgattctcacttgccaccctcgattatgcaaggtaattaaatccacactggtggccacctcgcctcgaaggggttcattggtccaacagagcctacctcctttcctagaacagaaagggggaagtgggtctagcataagttcatcgggagggtctgcatccatggtaaagattcccggaagtaaatccttatcaaaatagctgatgggagtggggtcatctaaggccatttgccattctcgagctgccagtgcgcgctcatatgggttaaggggactgccccatggcatgggatgggtgagtgcagaggcatacatgccacagatgtcatagacgtagatgggatcctcaaagatgcctatgtaggttggatagcatcgcccccctctgatacttgctcgcacatagtcatatagttcatgtgatggcgctagcagccccggacccaagttggtgcgattgggtttttctgttctgtagacgatctggcgaaagatggcgtgagaattggaagagatggtgggtctttgaaaaatgttgaaatgggcatgaggtagacctacagagtctctgacaaagtgggcataagattcttgaagcttggttaccagttcggcggtgacaagtacgtctagggcgcagtagtcaagtgtttcttgaatgatgtcataacctggttggtttttcttttcccacagttcgcggttgagaaggtattcttcgcgatccttccagtactcttctagcggaaacccgtctttgtctgcacggtaagatcctagcatgtagaactgattaactgccttgtaagggcagcagcccttctctacgggtagagagtatgcttgagcagcttttcgtagcgaagcgtgagtaagggcaaaggtgtctctgaccatgactttgaggaattggtatttgaagtcgatgtcgtcacaggctccctgttcccagagttggaagtctacccgtttcttgtaggcggggttgggcaaagcgaaagtaacatcattgaagagaatcttgccggccctgggcatgaaattgcgagtgatgcgaaaaggctgtggtacttccgctcggttattgataacctgggcagctaggacgatctcgtcgaaaccgttgatgttgtgtcctacgatgtataattctatgaaacgcggcgtgcctctgacgtgaggtagcttactgagctcatcaaaggttaggtctgtggggtcagataaggcgtagtgttcgagagcccattcgtgcaggtgaggattcgctttaaggaaggaggaccagaggtccactgccagtgctgtttgtaactggtcccggtactgacgaaaatgccgtccgactgccattttttctggggtgacgcaatagaaggtttgggggtcctgccgccagcgatcccacttgagttttatggcgaggtcataggcgatgttgacgagccgctggtctccagagagtttcatgaccagcatgaaggggattagctgcttgccaaaggaccccatccaggtgtaggtttccacatcgtaggtgagaaagagcctttctgtgcgaggatgagagccaatcgggaagaactggatctcctgccaccagttggaggaatggctgttgatgtgatggaagtagaactccctgcgacgcgccgagcattcatgcttgtgcttgtacagacggccgcagtagtcgcagcgttgcacgggttgtatctcgtgaatgagttgtacctggcttcccttgacgagaaatttcagtgggaagccgaggcctggcgattgtatctcgtgctttactatgttgtctgcatcggcctgttcatcttctgtctcgatggtggtcatgctgacgagccctcgcgggaggcaagtccagacctcggcgcggcaggggcggagctcgaggacgagagcgcgcaggctggagctgtccagggtcctgagacgctgcggactcaggttagtaggcagtgtcaggagattaacttgcatgatcttttggagggcgtgcgggaggttcagatagtacttgatctcaacgggtccgttggtggagatgtcgatggcttgcagggttccgtgtcccttgggcgctaccaccgtgcccttgtttttcattttggacggcggtggctctgttgcttcttgcatgtttagaagcggtgtcgagggcgcgcaccgggcggcaggggcggctcgggacccggcggcatggctggcagtggtacgtcggcgccgcgcgcgggtaggttctggtactgcgccctgagaagactcgcatgcgcgacgacgcggcggttgacatcctggatctgacgcctctgggtgaaagctaccggccccgtgagcttgaacctgaaagagagttcaacagaatcaatctcggtatcgttgacggcggcttgcctaaggatttcttgcacgtcaccagagttgtcctggtaggcgatctccgccatgaactgctcgatctcttcctcttgaagatctccgcggcccgctctctcgacggtggccgcgaggtcgttggagatgcgcccaatgagttgagagaatgcattcatgcccgcctcgttccagacgcggctgtagaccacggcccccacgggatctctcgcgcgcatgaccacctgggcgaggttgagctccacgtggcgggtgaagaccgcatagttgcataggcgctggaaaaggtagttgagtgtggtggcgatgtgctcggtgacgaagaaatacatgatccatcgtctcagcggcatctcgctgacatcgcccagagcttccaagcgctccatggcctcgtagaagtccacggcaaaattaaaaaactgggagtttcgcgcggacacggtcaactcctcttccagaagacggataagttcggcgatggtggtgcgcacctcgcgctcgaaagcccctgggatttcttcctcaatctcttcttcttccactaacatctcttcctcttcaggtggggctgcaggaggagggggaacgcggcgacgccggcggcgcacgggcagacggtcgatgaatctttcaatgacctctccgcggcggcggcgcatggtttcagtgacggcgcggccgttctcgcgcggtcgcagagtaaaaacaccgccgcgcatctccttaaagtggtgactgggaggttctccgtttgggagggagagggcgctgattatacattttattaattggcccgtagggactgcacgcagagatctgatcgtgtcaagatccacgggatctgaaaacctttcgacgaaagcgtctaaccagtcacagtcacaaggtaggctgagtacggcttcttgtgggcgggggtggttatgtgttcggtctgggtcttctgtttcttcttcatctcgggaaggtgagacgatgctgctggtgatgaaattaaagtaggcagttctaagacggcggatggtggcgaggagcaccaggtctttgggtccggcttgctggatacgcaggcgattggccattccccaagcattatcctgacatctagcaagatctttgtagtagtcttgcatgagccgttctacgggcacttcttcctcacccgttctgccatgcatacgtgtgagtccaaatccgcgcattggttgtaccagtgccaagtcagctacgactctttcggcgaggatggcttgctgtacttgggtaagggtggcttgaaagtcatcaaaatccacaaagcggtggtaagctcctgtattaatggtgtaagcacagttggccatgactgaccagttaactgtctggtgaccagggcgcacgagctcggtgtatttaaggcgcgaataggcgcgggtgtcaaagatgtaatcgttgcaggtgcgcaccagatactggtaccctataagaaaatgcggcggtggttggcggtagagaggccatcgttctgtagctggagcgccaggggcgaggtcttccaacataaggcggtgatagccgtagatgtacctggacatccaggtgattcctgcggcggtagtagaagcccgaggaaactcgcgtacgcggttccaaatgttgcgtagcggcatgaagtagttcattgtaggcacggtttgaccagtgaggcgcgcgcagtcattgatgctctatagacacggagaaaatgaaagcgttcagcgactcgactccgtagcctggaggaacgtgaacgggttgggtcgcggtgtaccccggttcgagacttgtactcgagccggccggagccgcggctaacgtggtattggcactcccgtctcgacccagcctacaaaaatccaggatacggaatcgagtcgttttgctggtttccgaatggcagggaagtgagtcctattttttttttttgccgctcagatgcatcccgtgctgcgacagatgcgcccccaacaacagcccccctcgcagcagcagcagcagcaatcacaaaaggctgtccctgcaactactgcaactgccgccgtgagcggtgcgggacagcccgcctatgatctggacttggaagagggcgaaggactggcacgtctaggtgcgccttcacccgagcggcatccgcgagttcaactgaaaaaagattctcgcgaggcgtatgtgccccaacagaacctatttagagacagaagcggcgaggagccggaggagatgcgagcttcccgctttaacgcgggtcgtgagctgcgtcacggtttggaccgaagacgagtgttgcgggacgaggatttcgaagttgatgaaatgacagggatcagtcctgccagggcacacgtggctgcagccaaccttgtatcggcttacgagcagacagtaaaggaagagcgtaacttccaaaagtcttttaataatcatgtgcgaaccctgattgcccgcgaagaagttacccttggtttgatgcatttgtgggatttgatggaagctatcattcagaaccctactagcaaacctctgaccgcccagctgtttctggtggtgcaacacagcagagacaatgaggctttcagagaggcgctgctgaacatcaccgaacccgaggggagatggttgtatgatcttatcaacattctacagagtatcatagtgcaggagcggagcctgggcctggccgagaaggtggctgccatcaattactcggttttgagcttgggaaaatattacgctcgcaaaatctacaagactccatacgttcccatagacaaggaggtgaagatagatgggttctacatgcgcatgacgctcaaggtcttgaccctgagcgatgatcttggggtgtatcgcaatgacagaatgcatcgcgcggttagcgccagcaggaggcgcgagttaagcgacagggaactgatgcacagtttgcaaagagctctgactggagctggaaccgagggtgagaattacttcgacatgggagctgacttgcagtggcagcctagtcgcagggctctgagcgccgcgacggcaggatgtgagcttccttacatagaagaggcggatgaaggcgaggaggaagagggcgagtacttggaagactgatggcacaacccgtgttttttgctagatggaacagcaagcaccggatcccgcaatgcgggcggcgctgcagagccagccgtccggcattaactcctcggacgattggacccaggccatgcaacgtatcatggcgttgacgactcgcaaccccgaagcctttagacagcaaccccaggccaaccgtctatcggccatcatggaagctgtagtgccttcccgctctaatcccactcatgagaaggtcctggccatcgtgaacgcgttggtggagaacaaagctattcgtccagatgaggccggactggtatacaacgctctcttagaacgcgtggctcgctacaacagtagcaatgtgcaaaccaatttggaccgtatgataacagatgtacgcgaagccgtgtctcagcgcgaaaggttccagcgtgatgccaacctgggttcgctggtggcgttaaatgctttcttgagtactcagcctgctaatgtgccgcgtggtcaacaggattatactaactttttaagtgctttgagactgatggtatcagaagtacctcagagcgaagtgtatcagtccggtcctgattacttctttcagactagcagacagggcttgcagacggtaaatctgagccaagcttttaaaaaccttaaaggtttgtggggagtgcatgccccggtaggagaaagagcaaccgtgtctagcttgttaactccgaactcccgcctattattactgttggtagctcctttcaccgacagcggtagcatcgaccgtaattcctatttgggttacctactaaacctgtatcgcgaagccatagggcaaagtcaggtggacgagcagacctatcaagaaattacccaagtcagtcgcgctttgggacaggaagacactggcagtttggaagccactctgaacttcttgcttaccaatcggtctcaaaagatccctcctcaatatgctcttactgcggaggaggagaggatccttagatatgtgcagcagagcgtgggattgtttctgatgcaagagggggcaactccgactgcagcactggacatgacagcgcgaaatatggagcccagcatgtatgccagtaaccgacctttcattaacaaactgctggactacttgcacagagctgccgctatgaactctgattatttcaccaatgccatcttaaacccgcactggctgcccccacctggtttctacacgggcgaatatgacatgcccgaccctaatgacggatttctgtgggacgacgtggacagcgatgttttttcacctctttctgatcatcgcacgtggaaaaaggaaggcggcgatagaatgcattcttctgcatcgctgtccggggtcatgggtgctaccgcggctgagcccgagtctgcaagtccttttcctagtctacccttttctctacacagtgtacgtagcagcgaagtgggtagaataagtcgcccgagtttaatgggcgaagaggagtatctaaacgattccttgctcagaccggcaagagaaaaaaatttcccaaacaatggaatagaaagtttggtggataaaatgagtagatggaagacttatgctcaggatcacagagacgagcctgggatcatggggattacaagtagagcgagccgtagacgccagcgccatgacagacagaggggtcttgtgtgggacgatgaggattcggccgatgatagcagcgtgctggacttgggtgggagaggaaggggcaacccgtttgctcatttgcgccctcgcttgggtggtatgttgtaaaaaaaaataaaaaaaaaactcaccaaggccatggcgacgagcgtacgttcgttcttctttattatctgtgtctagtataatgaggcgagtcgtgctaggcggagcggtggtgtatccggagggtcctcctccttcgtacgagagcgtgatgcagcagcagcaggcgacggcggtgatgcaatccccactggaggctccctttgtgcctccgcgatacctggcacctacggagggcagaaacagcattcgttattcggaactggcacctcagtacgataccaccaggttgtatctggtggacaacaagtcggcggacattgcttctctgaactatcagaatgaccacagcaacttcttgaccacggtggtgcaaaacaatgactttacccctacggaagccagcacccagaccattaactttgatgaacgatcgcggtggggcggtcagctaaagaccatcatgcatactaacatgccaaacgtgaacgagtatatgtttagtaacaagttcaaagcgcgtgtgatggtgtccagaaaacctcccgacggtgctgcagttggggatacttatgatcacaagcaggatattttgaaatatgagtggttcgagtttactttgccagaaggcaacttttcagttactatgactattgatttgatgaacaatgccatcatagataattacttgaaagtgggtagacagaatggagtgcttgaaagtgacattggtgttaagttcgacaccaggaacttcaagctgggatgggatcccgaaaccaagttgatcatgcctggagtgtatacgtatgaagccttccatcctgacattgtcttactgcctggctgcggagtggattttaccgagagtcgtttgagcaaccttcttggtatcagaaaaaaacagccatttcaagagggttttaagattttgtatgaagatttagaaggtggtaatattccggccctcttggatgtagatgcctatgagaacagtaagaaagaacaaaaagccaaaatagaagctgctacagctgctgcagaagctaaggcaaacatagttgccagcgactctacaagggttgctaacgctggagaggtcagaggagacaattttgcgccaacacctgttccgactgcagaatcattattggccgatgtgtctgaaggaacggacgtgaaactcactattcaacctgtagaaaaagatagtaagaatagaagctataatgtgttggaagacaaaatcaacacagcctatcgcagttggtatctttcgtacaattatggcgatcccgaaaaaggagtgcgttcctggacattgctcaccacctcagatgtcacctgcggagcagagcaggtctactggtcgcttccagacatgatgaaggatcctgtcactttccgctccactagacaagtcagtaactaccctgtggtgggtgcagagcttatgcccgtcttctcaaagagcttctacaacgaacaagctgtgtactcccagcagctccgccagtccacctcgcttacgcacgtcttcaaccgctttcctgagaaccagattttaatccgtccgccggcgcccaccattaccaccgtcagtgaaaacgttcctgctctcacagatcacgggaccctgccgttgcgcagcagtatccggggagtccaacgtgtgaccgttactgacgccagacgccgcacctgtccctacgtgtacaaggcactgggcatagtcgcaccgcgcgtcctttcaagccgcactttctaaaaaaaaaaaaaatgtccattcttatctcgcccagtaataacaccggttggggtctgcgcgctccaagcaagatgtacggaggcgcacgcaaacgttctacccaacatcctgtccgtgttcgcggacattttcgcgctccatggggcgccctcaagggccgcactcgcgttcgaaccaccgtcgatgatgtaatcgatcaggtggttgccgacgcccgtaattatactcctactgcgcctacatctactgtggatgcagttattgacagtgtagtggctgacgctcgcaactatgctcgacgtaagagccggcgaaggcgcattgccagacgccaccgagctaccactgccatgcgagccgcaagagctctgctacgaagagctagacgcgtggggcgaagagccatgcttagggcggccagacgtgcagcttcgggcgccagcgccggcaggtcccgcaggcaagcagccgctgtcgcagcggcgactattgccgacatggcccaatcgcgaagaggcaatgtatactgggtgcgtgacgctgccaccggtcaacgtgtacccgtgcgcacccgtccccctcgcacttagaagatactgagcagtctccgatgttgtgtcccagcggcgaggatgtccaagcgcaaatacaaggaagaaatgctgcaggttatcgcacctgaagtctacggccaaccgttgaaggatgaaaaaaaaccccgcaaaatcaagcgggttaaaaaggacaaaaaagaagaggaagatggcgatgatgggctggcggagtttgtgcgcgagtttgccccacggcgacgcgtgcaatggcgtgggcgcaaagttcgacatgtgttgagacctggaacttcggtggtctttacacccggcgagcgttcaagcgctacttttaagcgttcctatgatgaggtgtacggggatgatgatattcttgagcaggcggctgaccgattaggcgagtttgcttatggcaagcgtagtagaataacttccaaggatgagacagtgtcgatacccttggatcatggaaatcccacccctagtcttaaaccggtcactttgcagcaagtgttacccgtaactccgcgaacaggtgttaaacgcgaaggtgaagatttgtatcccactatgcaactgatggtacccaaacgccagaagttggaggacgttttggagaaagtaaaagtggatccagatattcaacctgaggttaaagtgagacccattaagcaggtagcgcctggtctgggggtacaaactgtagacattaagattcccactgaaagtatggaagtgcaaactgaacccgcaaagcctactgccacctccactgaagtgcaaacggatccatggatgcccatgcctattacaactgacgccgccggtcccactcgaagatcccgacgaaagtacggtccagcaagtctgttgatgcccaattatgttgtacacccatctattattcctactcctggttaccgaggcactcgctactatcgcagccgaaacagtacctcccgccgtcgccgcaagacacctgcaaatcgcagtcgtcgccgtagacgcacaagcaaaccgactcccggcgccctggtgcggcaagtgtaccgcaatggtagtgcggaacctttgacactgccgcgtgcgcgttaccatccgagtatcatcacttaatcaatgttgccgctgcctccttgcagatatggccctcacttgtcgccttcgcgttcccatcactggttaccgaggaagaaactcgcgccgtagaagagggatgttgggacgcggaatgcgacgctacaggcgacggcgtgctatccgcaagcaattgcggggtggttttttaccagccttaattccaattatcgctgctgcaattggcgcgataccaggcatagcttccgtggcggttcaggcctcgcaacgacattgacattggaaaaaaacgtataaataaaaaaaaaaaaatacaatggactctgacactcctggtcctgtgactatgttttcttagagatggaagacatcaatttttcatccttggctccgcgacacggcacgaagccgtacatgggcacctggagcgacatcggcacgagccaactgaacgggggcgccttcaattggagcagtatctggagcgggcttaaaaattttggctcaaccataaaaacatacgggaacaaagcttggaacagcagtacaggacaggcgcttagaaataaacttaaagaccagaacttccaacaaaaagtagtcgatgggatagcttccggcatcaatggagtggtagatttggctaaccaggctgtgcagaaaaagataaacagtcgtttggacccgccgccagcaaccccaggtgaaatgcaagtggaggaagaaattcctccgccagaaaaacgaggcgacaagcgtccgcgtcccgatttggaagagacgctggtgacgcgcgtagatgaaccgccttcttatgaggaagcaacgaagcttggaatgcccaccactagaccgatagccccaatggccaccggggtgatgaaaccttctcagttgcatcgacccgtcaccttggatttgccccctccccctgctgctactgctgtacccgcttctaagcctgtcgctgccccgaaaccagtcgccgtagccaggtcacgtcccgggggcgctcctcgtccaaatgcgcactggcaaaatactctgaacagcatcgtgggtctaggcgtgcaaagtgtaaaacgccgtcgctgcttttaattaaatatggagtagcgcttaacttgcctatctgtgtatatgtgtcattacacgccgtcacagcagcagaggaaaaaaggaagaggtcgtgcgtcgacgctgagttactttcaagatggccaccccatcgatgctgccccaatgggcatacatgcacatcgccggacaggatgcttcggagtacctgagtccgggtctggtgcagttcgcccgcgccacagacacctacttcaatctgggaaataagtttagaaatcccaccgtagcgccgacccacgatgtgaccaccgaccgtagccagcggctcatgttgcgcttcgtgcccgttgaccgggaggacaatacatactcttacaaagtgcggtacaccctggccgtgggcgacaacagagtgctggatatggccagcacgttctttgacattaggggtgtgttggacagaggtcccagtttcaaaccctattctggtacggcttacaactccctggctcctaaaggcgctccaaatacatctcagtggattgcagaaggtgtaaaaaatacaactggtgaggaacacgtaacagaagaggaaaccaatactactacttacacttttggcaatgctcctgtaaaagctgaagctgaaattacaaaagaaggactcccagtaggtttggaagtttcagatgaagaaagtaaaccgatttatgctgataaaacatatcagccagaacctcagctgggagatgaaacttggactgaccttgatggaaaaaccgaaaagtatggaggcagggctctcaaacccgatactaagatgaaaccatgctacgggtcctttgccaaacctactaatgtgaaaggcggtcaggcaaaacaaaaaacaacggagcagccaaatcagaaagtcgaatatgatatcgacatggagttttttgatgcggcatcgcagaaaacaaacttaagtcctaaaattgtcatgtatgcagaaaatgtaaatttggaaactccagacactcatgtagtgtacaaacctggaacagaagacacaagttccgaagctaatttgggacaacaatctatgcccaacagacccaactacattggcttcagagataactttattggacttatgtactataacagtactggtaacatgggggtgctggctggtcaagcgtctcagttaaatgcagtggttgacttgcaggacagaaacacagaactttcttaccaactcttgcttgactctctgggcgacagaaccagatactttagcatgtggaatcaggctgtggacagttatgatcctgatgtacgtgttattgaaaatcatggtgtggaagatgaacttcccaactactgttttccactggacggcataggtgttccaacaaccagttacaaatcaatagttccaaatggagacaatgcgcctaattggaaggaacctgaagtaaatggaacaagtgagatcggacagggtaatttgtttgccatggaaattaaccttcaagccaatctatggcgaagtttcctttattccaatgtggctctatatctcccagactcgtacaaatacaccccgtccaatgtcactcttccagaaaacaaaaacacctacgactacatgaacgggcgggtggtgccgccatctctagtagacacctatgtgaacattggtgccaggtggtctctggatgccatggacaatgtcaacccattcaaccaccaccgtaacgctggcttgcgttaccgatccatgcttctgggtaacggacgttatgtgcctttccacatacaagtgcctcaaaaattcttcgctgttaaaaacctgctgcttctcccaggctcctacacttatgagtggaactttaggaaggatgtgaacatggttctacagagttccctcggtaacgacctgcgggtagatggcgccagcatcagtttcacgagcatcaacctctatgctacttttttccccatggctcacaacaccgcttccacccttgaagccatgctgcggaatgacaccaatgatcagtcattcaacgactacctatctgcagctaacatgctctaccccattcctgccaatgcaaccaatattcccatttccattccttctcgcaactgggcggctttcagaggctggtcatttaccagactgaaaaccaaagaaactccctctttggggtctggatttgacccctactttgtctattctggttctattccctacctggatggtaccttctacctgaaccacacttttaagaaggtttccatcatgtttgactcttcagtgagctggcctggaaatgacaggttactatctcctaacgaatttgaaataaagcgcactgtggatggcgaaggctacaacgtagcccaatgcaacatgaccaaagactggttcttggtacagatgctcgccaactacaacatcggctatcagggcttctacattccagaaggatacaaagatcgcatgtattcatttttcagaaacttccagcccatgagcaggcaggtggttgatgaggtcaattacaaagacttcaaggccgtcgccataccctaccaacacaacaactctggctttgtgggttacatggctccgaccatgcgccaaggtcaaccctatcccgctaactatccctatccactcattggaacaactgccgtaaatagtgttacgcagaaaaagttcttgtgtgacagaaccatgtggcgcataccgttctcgagcaacttcatgtctatgggggcccttacagacttgggacagaatatgctctatgccaactcagctcatgctctggacatgacctttgaggtggatcccatggatgagcccaccctgctttatcttctcttcgaagttttcgacgtggtcagagtgcatcagccacaccgcggcatcatcgaggcagtctacctgcgtacaccgttctcggccggtaacgctaccacgtaagaagcttcttgcttcttgcaaatagcagctgcaaccatggcctgcggatcccaaaacggctccagcgagcaagagctcagagccattgtccaagacctgggttgcggaccctattttttgggaacctacgataagcgcttcccggggttcatggcccccgataagctcgcctgtgccattgtaaatacggccggacgtgagacggggggagagcactggttggctttcggttggaacccacgttctaacacctgctacctttttgatccttttggattctcggatgatcgtctcaaacagatttaccagtttgaatatgagggtctcctgcgccgcagcgctcttgctaccaaggaccgctgtattacgctggaaaaatctacccagaccgtgcagggtccccgttctgccgcctgcggacttttctgctgcatgttccttcacgcctttgtgcactggcctgaccgtcccatggacggaaaccccaccatgaaattgctaactggagtgccaaacaacatgcttcattctcctaaagtccagcccaccctgtgtgacaatcaaaaagcactctaccattttcttaatacccattcgccttattttcgctcccatcgtacacacatcgaaagggccactgcgttcgaccgtatggatgttcaataatgactcatgtaaacaacgtgttcaataaacatcactttatttttttacatgtatcaaggctctgcattacttatttatttacaagtcgaatgggttctgacgagaatcagaatgacccgcaggcagtgatacgttgcggaactgatacttgggttgccacttgaattcgggaatcaccaacttgggaaccggtatatcgggcaggatgtcactccacagctttctggtcagctgcaaagctccaagcaggtcaggagccgaaatcttgaaatcacaattaggaccagtgctttgagcgcgagagttgcggtacaccggattgcagcactgaaacaccatcagcgacggatgtctcacgcttgccagcacggtgggatctgcaatcatgcccacatccagatcttcagcattggcaatgctgaacggggtcatcttgcaggtctgcctacccatggcgggcacccaattaggcttgtggttgcaatcgcagtgcagggggatcagtatcatcttggcctgatcctgtctgattcctggatacacggctctcatgaaagcatcatattgcttgaaagcctgctgggctttactaccctcggtataaaacatcccgcaggacctgctcgaaaactggttagctgcacagccggcatcattcacacagcagcgggcgtcattgttagctatttgcaccacacttctgccccagcggttttgggtgattttggttcgctcgggattctcctttaaggctcgttgtccgttctcgctggccacatccatctcgataatctgctccttctgaatcataatattgccatgcaggcacttcagcttgccctcataatcattgcagccatgaggccacaacgcacagcctgtacattcccaattatggtgggcgatctgagaaaaagaatgtatcattccctgcagaaatcttcccatcatcgtgctcagtgtcttgtgactagtgaaagttaactggatgcctcggtgctcctcgtttacgtactggtgacagatgcgcttgtattgttcgtgttgctcaggcattagtttaaaagaggttctaagttcgttatccagcctgtacttctccatcagcagacacatcacttccatgcctttctcccaagcagacaccaggggcaagctaatcggattcttaacagtgcaggcagcagctcctttagccagagggtcatctttagcgatcttctcaatgcttcttttgccatccttctcaacgatgcgcacgggcgggtagctgaaacccactgctacaagttgcgcctcttctctttcttcttcgctgtcttgactgatgtcttgcatggggatatgtttggtcttccttggcttctttttggggggtatcggaggaggaggactgtcgctccgttccggagacagggaggattgtgacgtttcgctcaccattaccaactgactgtcggtagaagaacctgaccccacacggcgacaggtgtttctcttcgggggcagaggtggaggcgattgcgaagggctgcggtccgacctggaaggcggatgactggcagaaccccttccgcgttcgggggtgtgctccctgtggcggtcgcttaactgatttccttcgcggctggccattgtgttctcctaggcagagaaacaacagacatggaaactcagccattgctgtcaacatcgccacgagtgccatcacatctcgtcctcagcgacgaggaaaaggagcagagcttaagcattccaccgcccagtcctgccaccacctctaccctagaagataaggaggtcgacgcatctcatgacatgcagaataaaaaagcgaaagagtctgagacagacatcgagcaagacccgggctatgtgacaccggtggaacacgaggaagagttgaaacgctttctagagagagaggatgaaaactgcccaaaacaacgagcagataactatcaccaagatgctggaaatagggatcagaacaccgactacctcatagggcttgacggggaagacgcgctccttaaacatctagcaagacagtcgctcatagtcaaggatgcattattggacagaactgaagtgcccatcagtgtggaagagctcagccgcgcctacgagcttaacctcttttcacctcgtactccccccaaacgtcagccaaacggcacctgcgagccaaatcctcgcttaaacttttatccagcttttgctgtgccagaagtactggctacctatcacatcttttttaaaaatcaaaaaattccagtctcctgccgcgctaatcgcacccgcgccgatgccctactcaatctgggacctggttcacgcttacctgatatagcttccttggaagaggttccaaagatcttcgagggtctgggcaataatgagactcgggccgcaaatgctctgcaaaagggagaaaatggcatggatgagcatcacagcgttctggtggaattggaaggcgataatgccagactcgcagtactcaagcgaagcatcgaggtcacacacttcgcatatcccgctgtcaacctgccccctaaagtcatgacggcggtcatggaccagttactcattaagcgcgcaagtcccctttcagaagacatgcatgacccagatgcctgtgatgagggtaaaccagtggtcagtgatgagcagctaacccgatggctgggcaccgactctcccagggatttggaagagcgtcgcaagcttatgatggccgtggtgctggttaccgtagaactagagtgtctccgacgtttctttaccgattcagaaaccttgcgcaaactcgaagagaatctgcactacacttttagacacggctttgtgcggcaggcatgcaagatatctaacgtggaactcaccaacctggtttcctacatgggtattctgcatgagaatcgcctaggacaaagcgtgctgcacagcaccctgaagggggaagcccgccgtgattacatccgcgattgtgtctatctgtacctgtgccacacgtggcaaaccggcatgggtgtatggcagcaatgtttagaagaacagaacttgaaagagcttgacaagctcttacagaaatctcttaaggttctgtggacagggttcgacgagcgcaccgtcgcttccgacctggcagacctcatcttcccagagcgtctcagggttactttgcgaaacggattgcctgactttatgagccagagcatgcttaacaattttcgctctttcatcctggaacgctccggtatcctgcccgccacctgctgcgcactgccctccgactttgtgcctctcacctaccgcgagtgccccccgccgctatggagtcactgctacctgttccgtctggccaactatctctcctaccactcggatgtgatcgaggatgtgagcggagacggcttgctggagtgtcactgccgctgcaatctgtgcacgccccaccggtccctagcttgcaacccccagttgatgagcgaaacccagataataggcacctttgaattgcaaggccccagcagccaaggcgatgggtcttctcctgggcaaagtttaaaactgaccccgggactgtggacctccgcctacttgcgcaagtttgctccggaagattaccacccctatgaaatcaagttctatgaggaccaatcacagcctccaaaggccgaactttcggcctgcgtcatcacccagggggcaattctggcccaattgcaagccatccaaaaatcccgccaagaatttctactgaaaaagggtaagggggtctaccttgacccccagaccggcgaggaactcaacacaaggttccctcaggatgtcccaacgacgagaaaacaagaagttgaaggtgcagccgccgcccccagaagatatggaggaagattgggacagtcaggcagaggaggcggaggaggacagtctggaggacagtctggaggaagacagtttggaggaggaaaacgaggaggcagaggaggtggaagaagtaaccgccgacaaacagttatcctcggctgcggagacaagcaacagcgctaccatctccgctccgagtcgaggaacccggcggcgtcccagcagtagatgggacgagaccggacgcttcccgaacccaaccagcgcttccaagaccggtaagaaggatcggcagggatacaagtcctggcgggggcataagaatgccatcatctcctgcttgcatgagtgcgggggcaacatatccttcacgcggcgctacttgctattccaccatggggtgaactttccgcgcaatgttttgcattactaccgtcacctccacagcccctactatagccagcaaatcccggcagtctcgacagataaagacagcggcggcgacctccaacagaaaaccagcagcggcagttagaaaatacacaacaagtgcagcaacaggaggattaaagattacagccaacgagccagcgcaaacccgagagttaagaaatcggatctttccaaccctgtatgccatcttccagcagagtcggggtcaagagcaggaactgaaaataaaaaaccgatctctgcgttcgctcaccagaagttgtttgtatcacaagagcgaagatcaacttcagcgcactctcgaggacgccgaggctctcttcaacaagtactgcgcgctgactcttaaagagtaggcagcgaccgcgcttattcaaaaaaggcgggaattacatcatcctcgacatgagtaaagaaattcccacgccttacatgtggagttatcaaccccaaatgggattggcggcaggcgcctcccaggactactccacccgcatgaattggctcagcgccgggccttctatgatttctcgagttaatgatatacgcgcctaccgaaaccaaatacttttggaacagtcagctcttaccaccacgccccgccaacaccttaatcccagaaattggcccgccgccctagtgtaccaggaaagtcccgctcccaccactgtattacttcctcgagacgcccaggccgaagtccaaatgactaatgcaggtgcgcagttagctggcggctccaccctatgtcgtcacaggcctcggcataatataaaacgcctgatgatcagaggccgaggtatccagctcaacgacgagtcggtgagctctccgcttggtctacgaccagacggaatctttcagattgccggctgcgggagatcttccttcacccctcgtcaggctgttctgactttggaaagttcgtcttcgcaaccccgctcgggcggaatcgggaccgttcaatttgtggaggagtttactccctctgtctacttcaaccccttctccggatctcctgggcattacccggacgagttcataccgaacttcgacgcgattagcgagtcagtggacggctacgattgatgtctggtgacgcggctgagctatctcggctgcgacatctagaccactgccgccgctttcgctgctttgcccgggaactcattgagttcatctacttcgaactccccaaggatcaccctcaaggtccggcccacggagtgcggatttctatcgaaggcaaaatagactctcgcctgcaacgaattttctcccagcggcccgtgctgatcgagcgagaccagggaaacaccacggtttccatctactgcatttgtaatcaccccggattgcatgaaagcctttgctgtcttatgtgtactgagtttaataaaaactgaattaagactctcctacggactgccgcttcttcaacccggattttacaaccagaagaacgaaacttttcctgtcgtccaggactctgttaacttcacctttcctactcacaaactagaagctcaacgactacaccgcttttccagaagcattttccctactaatactactttcaaaaccggaggtgagctccaaggtcttcctacagaaaacccttgggtggaagcgggccttgtagtgctaggaattcttgcgggtgggcttgtgattattctttgctacctatacacaccttgcttcactttcttagtggtgttgtggtattggtttaaaaaatggggcccatactagtcttgcttgttttactttcgcttttggaaccgggttctgccaattacgatccatgtctagacttcgacccagaaaactgcacacttacttttgcacccgacacaagccgcatctgtggagttcatcgcctctcttacgaacttggcccccaacgacaaaaatttacctgcatggtgggaatcaaccccatagttatcacccagcaaagtggagatactaagggttgcattcactgctcctgcgattccatcgagtgcacctacaccctgctgaagaccctatgcggcctaagagacctgctaccaatgaattaaaaaatgattaataaaaaatcacttacttgaaatcagcaataaggtctctgttgaaattttctcccagcagcacctcacttccctcttcccaactctggtattctaaaccccgttcagcggcatactttctccatactttaaaggggatgtcaaattttagctcctctcctgtacccacaatcttcatgtctttcttcccagatgaccaagagagtccggctcagtgactccttcaaccctgtctacccctatgaagatgaaagcacctcccaacacccctttataaacccagggtttatttccccaaatggcttcacacaaagcccaaacggagttcttactttaaaatgtttaaccccactaacaaccacaggcggatctctacagctaaaagtgggagggggacttacagtggatgacaccaacggttttttgaaagaaaacataagtgccaccacaccactcgttaagactggtcactctataggtttaccactaggagccggattgggaacgaatgaaaataaactttgtatcaaattaggacaaggacttacattcaattcaaacaacatttgcattgatgacaatattaacaccttatggacaggagtcaaccccaccgaagccaactgtcaaatcatgaactccagtgaatctaatgattgcaaattaattctaacactagttaaaactggagcactagtcactgcatttgtttatgttataggagtatctaacaattttaatatgctaactacacacagaaatataaattttactgcagagctgtttttcgattctactggtaatttactaactagactctcatccctcaaaactccacttaatcataaatcaggacaaaacatggctactggtgccattactaatgctaaaggtttcatgcccagcacgactgcctatcctttcaatgataattctagagaaaaagaaaactacatttacggaacttgttactacacagctagtgatcgcactgcttttcccattgacatatctgtcatgcttaaccgaagagcaataaatgacgagacatcatattgtattcgtataacttggtcctggaacacaggagatgccccagaggtgcaaacctctgctacaaccctagtcacctccccatttaccttttactacatcagagaagacgactgacaaataaagtttgcgatcgcggctcccgccagatctagtaatcaattacggggtcattagttcatagcccatatatggagttccgcgttacataacttacggtaaatggcccgcctggctgaccgcccaacgacccccgcccattgacgtcaataatgacgtatgttcccatagtaacgccaatagggactttccattgacgtcaatgggtggagtatttacggtaaactgcccacttggcagtacatcaagtgtatcatatgccaagtacgccccctattgacgtcaatgacggtaaatggcccgcctggcattatgcccagtacatgaccttatgggactttcctacttggcagtacatctacgtattagtcatcgctattaccatgctgatgcggttttggcagtacatcaatgggcgtggatagcggtttgactcacggggatttccaagtctccaccccattgacgtcaatgggagtttgttttggcaccaaaatcaacgggactttccaaaatgtcgtaacaactccgccccattgacgcaaatgggcggtaggcgtgtacggtgggaggtctatataagcagagctggtttagtgaaccgtcagatcagatctttgtcgatcctaccatccactcgacacacccgccagcggccgcccaccatgaaatatacaagttatatcttggcttttcagctctgcatcgttttgggttctcttggctgttactgccaggacccatatgtaaaagaagcagaaaaccttaagaaatattttaatgcaggtcattcagatgtagcggataatggaactcttttcttaggcattttgaagaattggaaagaggagagtgacagaaaaataatgcagagccaaattgtctccttttacttcaaactttttaaaaactttaaagatgaccagagcatccaaaagagtgtggagaccatcaaggaagacatgaatgtcaagtttttcaatagcaacaaaaagaaacgagatgacttcgaaaagctgactaattattcggtaactgacttgaatgtccaacgcaaagcaatacatgaactcatccaagtgatggctgaactgtcgccagcagctaaaacagggaagcgaaaaaggagtcagatgctgtttcgaggtcgaagagcatcccagtaagctagcttgactgactgagatacagcgtaccttcagctcacagacatgataagatacattgatgagtttggacaaaccacaactagaatgcagtgaaaaaaatgctttatttgtgaaatttgtgatgctattgctttatttgtaaccattataagctgcaataaacaagttaacaacaacaattgcattcattttatgtttcaggttcagggggaggtgtgggaggttttttaaagcaagtaaaacctctacaaatgtggtagtcgtcagctatcctgcaggaacttgtttatttgaaaatcaattcacaaaatccgagtagttattttgcctcccccttcccatttaacagaatacaccaatctctccccacgcacagctttaaacatttggataccattagatatagacatggttttagattccacattccaaacagtttcagagcgagccaatctggggtcagtgatagataaaaatccatcgggatagtcttttaaagcgctttcacagtccaactgctgcggatgcgactccggagtctggatcacggtcatctggaagaagaacgatgggaatcataatccgaaaacggtatcggacgattgtgtctcatcaaacccacaagcagccgctgtctgcgtcgctccgtgcgactgctgtttatgggatcagggtccacagtgtcctgaagcatgattttaatagcccttaacatcaactttctggtgcgatgcgcgcagcaacgcattctgatttcactcaaatctttgcagtaggtacaacacattattacaatattgtttaataaaccataattaaaagcgctccagccaaaactcatatctgatataatcgcccctgcatgaccatcataccaaagtttaatataaattaaatgacgttccctcaaaaacacactacccacatacatgatctcttttggcatgtgcatattaacaatctgtctgtaccatggacaacgttggttaatcatgcaacccaatataaccttccggaaccacactgccaacaccgctcccccagccatgcattgaagtgaaccctgctgattacaatgacaatgaagaacccaattctctcgaccgtgaatcacttgagaatgaaaaatatctatagtggcacaacatagacataaatgcatgcatcttctcataatttttaactcctcaggatttagaaacatatcccagggaataggaagctcttgcagaacagtaaagctggcagaacaaggaagaccacgaacacaacttacactatgcatagtcatagtatcacaatctggcaacagcgggtggtcttcagtcatagaagctcgggtttcattttcctcacaacgtggtaactgggctctggtgtaagggtgatgtctggcgcatgatgtcgagcgtgcgcgcaaccttgtcataatggagttgcttcctgacattctcgtattttgtatagcaaaacgcggccctggcagaacacactcttcttcgccttctatcctgccgcttagcgtgttccgtgtgatagttcaagtacaaccacactcttaagttggtcaaaagaatgctggcttcagttgtaatcaaaactccatcgcatctaatcgttctgaggaaatcatccaagcaatgcaactggattgtgtttcaagcaggagaggagagggaagagacggaagaaccatgttaatttttattccaaacgatctcgcagtacttcaaattgtagatcgcgcagatggcatctctcgcccccactgtgttggtgaaaaagcacagctagatcaaaagaaatgcgattttcaaggtgctcaacggtggcttccagcaaagcctccacgcgcacatccaagaacaaaagaataccaaaagaaggagcattttctaactcctcaatcatcatattacattcctgcaccattcccagataattttcagctttccagccttgaattattcgtgtcagttcttgtggtaaatccaatccacacattacaaacaggtcccggagggcgccctccaccaccattcttaaacacaccctcataatgacaaaatatcttgctcctgtgtcacctgtagcgaattgagaatggcaacatcaattgacatgcccttggctctaagttcttctttaagttctagttgtaaaaactctctcatattatcaccaaactgcttagccagaagccccccgggaacaagagcaggggacgctacagtgcagtacaagcgcagacctccccaattggctccagcaaaaacaagattggaataagcatattgggaaccgccagtaatatcatcgaagttgctggaaatataatcaggcagagtttcttgtaaaaattgaataaaagaaaaatttgccaaaaaaacattcaaaacctctgggatgcaaatgcaataggttaccgcgctgcgctccaacattgttagttttgaattagtctgcaaaaataaaaaaaaaaacaagcgtcatatcatagtagcctgacgaacagatggataaatcagtctttccatcacaagacaagccacagggtctccagctcgaccctcgtaaaacctgtcatcatgattaaacaacagcaccgaaagttcctcgcggtgaccagcatgaataattcttgatgaagcatacaatccagacatgttagcatcagttaacgagaaaaaacagccaacatagcctttgggtataattatgcttaatcgtaagtatagcaaagccacccctcgcggatacaaagtaaaaggcacaggagaataaaaaatataattatttctctgctgctgttcaggcaacgtcgcccccggtccctctaaatacacatacaaagcctcatcagccatggcttaccagacaaagtacagcgggcacacaaagcacaagctctaaagtgactctccaacctctccacaatatatatatacacaagccctaaactgacgtaatgggagtaaagtgtaaaaaatcccgccaaacccaacacacaccccgaaactgcgtcaccagggaaaagtacagtttcacttccgcaatcccaacaggcgtaacttcctctttctcacggtacgtgatatcccactaacttgcaacgtcattttcccacggtcgcaccgccccttttagccgttaaccccacagccaatcaccacacgatccacactttttaaaatcacctcatttacatattggcaccattccatctataaggtatattatatagataga

SEQ ID NO: 50 - DNA, 33868 bp, Artificial Sequence
  NG-97 virus genome sequence consisting of a transgene cassette that encodes the cytokine, IFN?, inserted in the region BY.
tctatctatataatataccttatagatggaatggtgccaatatgtaaatgaggtgattttaaaaagtgtggatcgtgtggtgattggctgtggggttaacggctaaaaggggcggtgcgaccgtgggaaaatgacgttttgtgggggtggagtttttttgcaagttgtcgcgggaaatgtgacgcataaaaaggcttttttctcacggaactacttagttttcccacggtatttaacaggaaatgaggtagttttgaccggatgcaagtgaaaattgttgattttcgcgcgaaaactgaatgaggaagtgtttttctgaataatgtggtatttatggcagggtggagtatttgttcagggccaggtagactttgacccattacgtggaggtttcgattaccgtgttttttacctgaatttccgcgtaccgtgtcaaagtcttctgtttttacgtaggtgtcagctgatcgctagggtatttatacctcagggtttgtgtcaagaggccactcttgagtgccagcgagaagagttttctcctctgcgccggcagtttaataataaaaaaatgagagatttgcgatttctgcctcaggaaataatctctgctgagactggaaatgaaatattggagcttgtggtgcacgccctgatgggagacgatccggagccacctgtgcagctttttgagcctcctacgcttcaggaactgtatgatttagaggtagagggatcggaggattctaatgaggaagctgtaaatggcttttttaccgattctatgcttttagctgctaatgaagggttagaattagatccgcctttggacacttttgatactccaggggtaattgtggaaagcggtacaggtgtaagaaaattacctgatttgagttccgtggactgtgatttgcactgctatgaagacgggtttcctccgagtgatgaggaggaccatgaaaaggagcagtccatgcagactgcagcgggtgagggagtgaaggctgccaatgttggttttcagttggattgcccggagcttcctggacatggctgtaagtcttgtgaatttcacaggaaaaatactggagtaaaggaactgttatgttcgctttgttatatgagaacgcactgccactttatttacagtaagtgtgtttaagttaaaatttaaaggaatatgctgtttttcacatgtatattgagtgtgagttttgtgcttcttattataggtcctgtgtctgatgctgatgaatcaccatctcctgattctactacctcacctcctgagattcaagcacctgttcctgtggacgtgcgcaagcccattcctgtgaagcttaagcctgggaaacgtccagcagtggaaaaacttgaggacttgttacagggtggggacggacctttggacttgagtacacggaaacgtccaagacaataagtgttccatatccgtgtttacttaaggtgacgtcaatatttgtgtgacagtgcaatgtaataaaaatatgttaactgttcactggtttttattgctttttgggcggggactcaggtatataagtagaagcagacctgtgtggttagctcataggagctggctttcatccatggaggtttgggccattttggaagaccttaggaagactaggcaactgttagagaacgcttcggacggagtctccggtttttggagattctggttcgctagtgaattagctagggtagtttttaggataaaacaggactataaacaagaatttgaaaagttgttggtagattgcccaggactttttgaagctcttaatttgggccatcaggttcactttaaagaaaaagttttatcagttttagacttttcaaccccaggtagaactgctgctgctgtggcttttcttacttttatattagataaatggatcccgcagactcatttcagcaggggatacgttttggatttcatagccacagcattgtggagaacatggaaggttcgcaagatgaggacaatcttaggttactggccagtgcagcctttgggtgtagcgggaatcctgaggcatccaccggtcatgccagcggttctggaggaggaacagcaagaggacaacccgagagccggcctggaccctccagtggaggaggcggagtagctgacttgtctcctgaactgcaacgggtgcttactggatctacgtccactggacgggataggggcgttaagagggagagggcatctagtggtactgatgctagatctgagttggctttaagtttaatgagtcgcagacgtcctgaaaccatttggtggcatgaggttcagaaagagggaagggatgaagtttctgtattgcaggagaaatattcactggaacaggtgaaaacatgttggttggagcctgaggatgattgggaggtggccattaaaaattatgccaagatagctttgaggcctgataaacagtataagattactagacggattaatatccggaatgcttgttacatatctggaaatggggctgaggtggtaatagatactcaagacaaggcagttattagatgctgcatgatggatatgtggcctggggtagtcggtatggaagcagtaacttttgtaaatgttaagtttaggggagatggttataatggaatagtgtttatggccaataccaaacttatattgcatggttgtagcttttttggtttcaacaatacctgtgtagatgcctggggacaggttagtgtacggggatgtagtttctatgcgtgttggattgccacagctggcagaaccaagagtcaattgtctctgaagaaatgcatatttcaaagatgtaacctgggcattctgaatgaaggcgaagcaagggtccgccactgcgcttctacagatactggatgttttattttgattaagggaaatgccagcgtaaagcataacatgatttgcggtgcttccgatgagaggccttatcaaatgctcacttgtgctggtgggcattgtaatatgctggctactgtgcatattgtttcccatcaacgcaaaaaatggcctgtttttgatcacaatgtgatgacgaagtgtaccatgcatgcaggtgggcgtagaggaatgtttatgccttaccagtgtaacatgaatcatgtgaaagtgttgttggaaccagatgccttttccagaatgagcctaacaggaatttttgacatgaacatgcaaatctggaagatcctgaggtatgatgatacgagatcgagggtacgcgcatgcgaatgcggaggcaagcatgccaggttccagccggtgtgtgtagatgtgactgaagatctcagaccggatcatttggttattgcccgcactggagcagagttcggatccagtggagaagaaactgactaaggtgagtattgggaaaactttggggtgggattttcagatggacagattgagtaaaaatttgttttttctgtcttgcagctgtcatgagtggaaacgcttcttttaaggggggagtcttcagcccttatctgacagggcgtctcccatcctgggcaggagttcgtcagaatgttatgggatctactgtggatggaagacccgtccaacccgccaattcttcaacgctgacctatgctactttaagttcttcacctttggacgcagctgcagctgccgccgccgcttctgttgccgctaacactgtgcttggaatgggttactatggaagcatcatggctaattccacttcctctaataacccttctaccctgactcaggacaagttacttgtccttttggcccagctggaggctttgacccaacgtctgggtgaactttctcagcaggtggtcgagttgcgagtacaaactgagtctgctgtcggcacggcaaagtctaaataaaaaaatcccagaatcaatgaataaataaacaagcttgttgttgatttaaaatcaagtgtttttatttcatttttcgcgcacggtatgccctagaccaccgatctctatcattgagaactcggtggattttttccaggatcctatagaggtgggattgaatgtttagatacatgggcattaggccgtctttggggtggagatagctccattgaagggattcatgctccggggtagtgttgtaaatcacccagtcataacaaggtcgcagtgcatggtgttgcacaatatcttttagaagtaggctgattgccacagataagcccttggtgtaggtgtttacaaaccggttgagctgggatgggtgcattcggggtgaaattatgtgcattttggattggatttttaagttggcaatattgccgccaagatcccgtcttgggttcatgttatgaaggaccaccaagacggtgtatccggtacatttaggaaatttatcgtgcagcttggatggaaaagcgtggaaaaatttggagacacccttgtgtcctccaagattttccatgcactcatccatgataatagcaatggggccgtgggcagcggcgcgggcaaacacgttccgtgggtctgacacatcatagttatgttcctgagttaaatcatcataagccattttaatgaatttggggcggagagtaccagattggggtatgaatgttccttcgggccccggagcatagttcccctcacagatttgcatttcccaagctttcagttccgagggtggaatcatgtccacctggggggctatgaaaaacaccgtttctggggcgggggtgattaattgtgatgatagcaaatttctgagcaattgagatttgccacatccggtggggccataaatgattccgattacgggttgcaggtggtagtttagggaacggcaactgccgtcttctcgaagcaagggggccacctcgttcatcatttcccttacatgcatattttcccgcaccaaatccattaggaggcgctctcctcctagtgatagaagttcttgtagtgaggaaaagtttttcagcggtttcagaccgtcagccatgggcattttggagagagtttgctgcaaaagttctagtctgttccacagttcagtgatgtgttctatggcatctcgatccagcagacctcctcgtttcgcgggtttggacggctcctggaatagggtatgagacgatgggcgtccagcgctgccagggttcggtccttccagggtctcagtgttcgagtcagggttgtttccgtcacagtgaaggggtgtgcgcctgcttgggcgcttgccagggtgcgcttcagactcatcctgctggtcgaaaacttctgtcgcttggcgccctgtatgtcggccaagtagcagtttaccatgagttcgtagttgagcgcctcggctgcgtggcctttggcgcggagcttacctttggaagttttcttgcataccgggcagtataggcatttcagcgcatacaacttgggcgcaaggaaaacggattctggggagtatgcatctgcgccgcaggaggcgcaaacagtttcacattccaccagccaggttaaatccggttcattggggtcaaaaacaagttttccgccatattttttgatgcgtttcttacctttggtctccatgagttcgtgtcctcgttgagtgacaaacaggctgtccgtgtccccgtagactgattttacaggcctcttctccagtggagtgcctcggtcttcttcgtacaggaactctgaccactctgatacaaaggcgcgcgtccaggccagcacaaaggaggctatgtgggaggggtagcgatcgttgtcaaccagggggtccaccttttccaaagtatgcaaacacatgtcaccctcttcaacatccaggaatgtgattggcttgtaggtgtatttcacgtgacctggggtccccgctgggggggtataaaagggggcggttctttgctcttcctcactgtcttccggatcgctgtccaggaacgtcagctgttggggtaggtattccctctcgaaggcgggcatgacctctgcactcaggttgtcagtttctaagaacgaggaggatttgatattgacagtgccggttgagatgcctttcatgaggttttcgtccatctggtcagaaaacacaatttttttattgtcaagtttggtggcaaatgatccatacagggcgttggataaaagtttggcaatggatcgcatggtttggttcttttccttgtccgcgcgctctttggcggcgatgttgagttggacatactcgcgtgccaggcacttccattcggggaagatagttgttaattcatctggcacgattctcacttgccaccctcgattatgcaaggtaattaaatccacactggtggccacctcgcctcgaaggggttcattggtccaacagagcctacctcctttcctagaacagaaagggggaagtgggtctagcataagttcatcgggagggtctgcatccatggtaaagattcccggaagtaaatccttatcaaaatagctgatgggagtggggtcatctaaggccatttgccattctcgagctgccagtgcgcgctcatatgggttaaggggactgccccatggcatgggatgggtgagtgcagaggcatacatgccacagatgtcatagacgtagatgggatcctcaaagatgcctatgtaggttggatagcatcgcccccctctgatacttgctcgcacatagtcatatagttcatgtgatggcgctagcagccccggacccaagttggtgcgattgggtttttctgttctgtagacgatctggcgaaagatggcgtgagaattggaagagatggtgggtctttgaaaaatgttgaaatgggcatgaggtagacctacagagtctctgacaaagtgggcataagattcttgaagcttggttaccagttcggcggtgacaagtacgtctagggcgcagtagtcaagtgtttcttgaatgatgtcataacctggttggtttttcttttcccacagttcgcggttgagaaggtattcttcgcgatccttccagtactcttctagcggaaacccgtctttgtctgcacggtaagatcctagcatgtagaactgattaactgccttgtaagggcagcagcccttctctacgggtagagagtatgcttgagcagcttttcgtagcgaagcgtgagtaagggcaaaggtgtctctgaccatgactttgaggaattggtatttgaagtcgatgtcgtcacaggctccctgttcccagagttggaagtctacccgtttcttgtaggcggggttgggcaaagcgaaagtaacatcattgaagagaatcttgccggccctgggcatgaaattgcgagtgatgcgaaaaggctgtggtacttccgctcggttattgataacctgggcagctaggacgatctcgtcgaaaccgttgatgttgtgtcctacgatgtataattctatgaaacgcggcgtgcctctgacgtgaggtagcttactgagctcatcaaaggttaggtctgtggggtcagataaggcgtagtgttcgagagcccattcgtgcaggtgaggattcgctttaaggaaggaggaccagaggtccactgccagtgctgtttgtaactggtcccggtactgacgaaaatgccgtccgactgccattttttctggggtgacgcaatagaaggtttgggggtcctgccgccagcgatcccacttgagttttatggcgaggtcataggcgatgttgacgagccgctggtctccagagagtttcatgaccagcatgaaggggattagctgcttgccaaaggaccccatccaggtgtaggtttccacatcgtaggtgagaaagagcctttctgtgcgaggatgagagccaatcgggaagaactggatctcctgccaccagttggaggaatggctgttgatgtgatggaagtagaactccctgcgacgcgccgagcattcatgcttgtgcttgtacagacggccgcagtagtcgcagcgttgcacgggttgtatctcgtgaatgagttgtacctggcttcccttgacgagaaatttcagtgggaagccgaggcctggcgattgtatctcgtgctttactatgttgtctgcatcggcctgttcatcttctgtctcgatggtggtcatgctgacgagccctcgcgggaggcaagtccagacctcggcgcggcaggggcggagctcgaggacgagagcgcgcaggctggagctgtccagggtcctgagacgctgcggactcaggttagtaggcagtgtcaggagattaacttgcatgatcttttggagggcgtgcgggaggttcagatagtacttgatctcaacgggtccgttggtggagatgtcgatggcttgcagggttccgtgtcccttgggcgctaccaccgtgcccttgtttttcattttggacggcggtggctctgttgcttcttgcatgtttagaagcggtgtcgagggcgcgcaccgggcggcaggggcggctcgggacccggcggcatggctggcagtggtacgtcggcgccgcgcgcgggtaggttctggtactgcgccctgagaagactcgcatgcgcgacgacgcggcggttgacatcctggatctgacgcctctgggtgaaagctaccggccccgtgagcttgaacctgaaagagagttcaacagaatcaatctcggtatcgttgacggcggcttgcctaaggatttcttgcacgtcaccagagttgtcctggtaggcgatctccgccatgaactgctcgatctcttcctcttgaagatctccgcggcccgctctctcgacggtggccgcgaggtcgttggagatgcgcccaatgagttgagagaatgcattcatgcccgcctcgttccagacgcggctgtagaccacggcccccacgggatctctcgcgcgcatgaccacctgggcgaggttgagctccacgtggcgggtgaagaccgcatagttgcataggcgctggaaaaggtagttgagtgtggtggcgatgtgctcggtgacgaagaaatacatgatccatcgtctcagcggcatctcgctgacatcgcccagagcttccaagcgctccatggcctcgtagaagtccacggcaaaattaaaaaactgggagtttcgcgcggacacggtcaactcctcttccagaagacggataagttcggcgatggtggtgcgcacctcgcgctcgaaagcccctgggatttcttcctcaatctcttcttcttccactaacatctcttcctcttcaggtggggctgcaggaggagggggaacgcggcgacgccggcggcgcacgggcagacggtcgatgaatctttcaatgacctctccgcggcggcggcgcatggtttcagtgacggcgcggccgttctcgcgcggtcgcagagtaaaaacaccgccgcgcatctccttaaagtggtgactgggaggttctccgtttgggagggagagggcgctgattatacattttattaattggcccgtagggactgcacgcagagatctgatcgtgtcaagatccacgggatctgaaaacctttcgacgaaagcgtctaaccagtcacagtcacaaggtaggctgagtacggcttcttgtgggcgggggtggttatgtgttcggtctgggtcttctgtttcttcttcatctcgggaaggtgagacgatgctgctggtgatgaaattaaagtaggcagttctaagacggcggatggtggcgaggagcaccaggtctttgggtccggcttgctggatacgcaggcgattggccattccccaagcattatcctgacatctagcaagatctttgtagtagtcttgcatgagccgttctacgggcacttcttcctcacccgttctgccatgcatacgtgtgagtccaaatccgcgcattggttgtaccagtgccaagtcagctacgactctttcggcgaggatggcttgctgtacttgggtaagggtggcttgaaagtcatcaaaatccacaaagcggtggtaagctcctgtattaatggtgtaagcacagttggccatgactgaccagttaactgtctggtgaccagggcgcacgagctcggtgtatttaaggcgcgaataggcgcgggtgtcaaagatgtaatcgttgcaggtgcgcaccagatactggtaccctataagaaaatgcggcggtggttggcggtagagaggccatcgttctgtagctggagcgccaggggcgaggtcttccaacataaggcggtgatagccgtagatgtacctggacatccaggtgattcctgcggcggtagtagaagcccgaggaaactcgcgtacgcggttccaaatgttgcgtagcggcatgaagtagttcattgtaggcacggtttgaccagtgaggcgcgcgcagtcattgatgctctatagacacggagaaaatgaaagcgttcagcgactcgactccgtagcctggaggaacgtgaacgggttgggtcgcggtgtaccccggttcgagacttgtactcgagccggccggagccgcggctaacgtggtattggcactcccgtctcgacccagcctacaaaaatccaggatacggaatcgagtcgttttgctggtttccgaatggcagggaagtgagtcctattttttttttttgccgctcagatgcatcccgtgctgcgacagatgcgcccccaacaacagcccccctcgcagcagcagcagcagcaatcacaaaaggctgtccctgcaactactgcaactgccgccgtgagcggtgcgggacagcccgcctatgatctggacttggaagagggcgaaggactggcacgtctaggtgcgccttcacccgagcggcatccgcgagttcaactgaaaaaagattctcgcgaggcgtatgtgccccaacagaacctatttagagacagaagcggcgaggagccggaggagatgcgagcttcccgctttaacgcgggtcgtgagctgcgtcacggtttggaccgaagacgagtgttgcgggacgaggatttcgaagttgatgaaatgacagggatcagtcctgccagggcacacgtggctgcagccaaccttgtatcggcttacgagcagacagtaaaggaagagcgtaacttccaaaagtcttttaataatcatgtgcgaaccctgattgcccgcgaagaagttacccttggtttgatgcatttgtgggatttgatggaagctatcattcagaaccctactagcaaacctctgaccgcccagctgtttctggtggtgcaacacagcagagacaatgaggctttcagagaggcgctgctgaacatcaccgaacccgaggggagatggttgtatgatcttatcaacattctacagagtatcatagtgcaggagcggagcctgggcctggccgagaaggtggctgccatcaattactcggttttgagcttgggaaaatattacgctcgcaaaatctacaagactccatacgttcccatagacaaggaggtgaagatagatgggttctacatgcgcatgacgctcaaggtcttgaccctgagcgatgatcttggggtgtatcgcaatgacagaatgcatcgcgcggttagcgccagcaggaggcgcgagttaagcgacagggaactgatgcacagtttgcaaagagctctgactggagctggaaccgagggtgagaattacttcgacatgggagctgacttgcagtggcagcctagtcgcagggctctgagcgccgcgacggcaggatgtgagcttccttacatagaagaggcggatgaaggcgaggaggaagagggcgagtacttggaagactgatggcacaacccgtgttttttgctagatggaacagcaagcaccggatcccgcaatgcgggcggcgctgcagagccagccgtccggcattaactcctcggacgattggacccaggccatgcaacgtatcatggcgttgacgactcgcaaccccgaagcctttagacagcaaccccaggccaaccgtctatcggccatcatggaagctgtagtgccttcccgctctaatcccactcatgagaaggtcctggccatcgtgaacgcgttggtggagaacaaagctattcgtccagatgaggccggactggtatacaacgctctcttagaacgcgtggctcgctacaacagtagcaatgtgcaaaccaatttggaccgtatgataacagatgtacgcgaagccgtgtctcagcgcgaaaggttccagcgtgatgccaacctgggttcgctggtggcgttaaatgctttcttgagtactcagcctgctaatgtgccgcgtggtcaacaggattatactaactttttaagtgctttgagactgatggtatcagaagtacctcagagcgaagtgtatcagtccggtcctgattacttctttcagactagcagacagggcttgcagacggtaaatctgagccaagcttttaaaaaccttaaaggtttgtggggagtgcatgccccggtaggagaaagagcaaccgtgtctagcttgttaactccgaactcccgcctattattactgttggtagctcctttcaccgacagcggtagcatcgaccgtaattcctatttgggttacctactaaacctgtatcgcgaagccatagggcaaagtcaggtggacgagcagacctatcaagaaattacccaagtcagtcgcgctttgggacaggaagacactggcagtttggaagccactctgaacttcttgcttaccaatcggtctcaaaagatccctcctcaatatgctcttactgcggaggaggagaggatccttagatatgtgcagcagagcgtgggattgtttctgatgcaagagggggcaactccgactgcagcactggacatgacagcgcgaaatatggagcccagcatgtatgccagtaaccgacctttcattaacaaactgctggactacttgcacagagctgccgctatgaactctgattatttcaccaatgccatcttaaacccgcactggctgcccccacctggtttctacacgggcgaatatgacatgcccgaccctaatgacggatttctgtgggacgacgtggacagcgatgttttttcacctctttctgatcatcgcacgtggaaaaaggaaggcggcgatagaatgcattcttctgcatcgctgtccggggtcatgggtgctaccgcggctgagcccgagtctgcaagtccttttcctagtctacccttttctctacacagtgtacgtagcagcgaagtgggtagaataagtcgcccgagtttaatgggcgaagaggagtatctaaacgattccttgctcagaccggcaagagaaaaaaatttcccaaacaatggaatagaaagtttggtggataaaatgagtagatggaagacttatgctcaggatcacagagacgagcctgggatcatggggattacaagtagagcgagccgtagacgccagcgccatgacagacagaggggtcttgtgtgggacgatgaggattcggccgatgatagcagcgtgctggacttgggtgggagaggaaggggcaacccgtttgctcatttgcgccctcgcttgggtggtatgttgtaaaaaaaaataaaaaaaaaactcaccaaggccatggcgacgagcgtacgttcgttcttctttattatctgtgtctagtataatgaggcgagtcgtgctaggcggagcggtggtgtatccggagggtcctcctccttcgtacgagagcgtgatgcagcagcagcaggcgacggcggtgatgcaatccccactggaggctccctttgtgcctccgcgatacctggcacctacggagggcagaaacagcattcgttattcggaactggcacctcagtacgataccaccaggttgtatctggtggacaacaagtcggcggacattgcttctctgaactatcagaatgaccacagcaacttcttgaccacggtggtgcaaaacaatgactttacccctacggaagccagcacccagaccattaactttgatgaacgatcgcggtggggcggtcagctaaagaccatcatgcatactaacatgccaaacgtgaacgagtatatgtttagtaacaagttcaaagcgcgtgtgatggtgtccagaaaacctcccgacggtgctgcagttggggatacttatgatcacaagcaggatattttgaaatatgagtggttcgagtttactttgccagaaggcaacttttcagttactatgactattgatttgatgaacaatgccatcatagataattacttgaaagtgggtagacagaatggagtgcttgaaagtgacattggtgttaagttcgacaccaggaacttcaagctgggatgggatcccgaaaccaagttgatcatgcctggagtgtatacgtatgaagccttccatcctgacattgtcttactgcctggctgcggagtggattttaccgagagtcgtttgagcaaccttcttggtatcagaaaaaaacagccatttcaagagggttttaagattttgtatgaagatttagaaggtggtaatattccggccctcttggatgtagatgcctatgagaacagtaagaaagaacaaaaagccaaaatagaagctgctacagctgctgcagaagctaaggcaaacatagttgccagcgactctacaagggttgctaacgctggagaggtcagaggagacaattttgcgccaacacctgttccgactgcagaatcattattggccgatgtgtctgaaggaacggacgtgaaactcactattcaacctgtagaaaaagatagtaagaatagaagctataatgtgttggaagacaaaatcaacacagcctatcgcagttggtatctttcgtacaattatggcgatcccgaaaaaggagtgcgttcctggacattgctcaccacctcagatgtcacctgcggagcagagcaggtctactggtcgcttccagacatgatgaaggatcctgtcactttccgctccactagacaagtcagtaactaccctgtggtgggtgcagagcttatgcccgtcttctcaaagagcttctacaacgaacaagctgtgtactcccagcagctccgccagtccacctcgcttacgcacgtcttcaaccgctttcctgagaaccagattttaatccgtccgccggcgcccaccattaccaccgtcagtgaaaacgttcctgctctcacagatcacgggaccctgccgttgcgcagcagtatccggggagtccaacgtgtgaccgttactgacgccagacgccgcacctgtccctacgtgtacaaggcactgggcatagtcgcaccgcgcgtcctttcaagccgcactttctaaaaaaaaaaaaaatgtccattcttatctcgcccagtaataacaccggttggggtctgcgcgctccaagcaagatgtacggaggcgcacgcaaacgttctacccaacatcctgtccgtgttcgcggacattttcgcgctccatggggcgccctcaagggccgcactcgcgttcgaaccaccgtcgatgatgtaatcgatcaggtggttgccgacgcccgtaattatactcctactgcgcctacatctactgtggatgcagttattgacagtgtagtggctgacgctcgcaactatgctcgacgtaagagccggcgaaggcgcattgccagacgccaccgagctaccactgccatgcgagccgcaagagctctgctacgaagagctagacgcgtggggcgaagagccatgcttagggcggccagacgtgcagcttcgggcgccagcgccggcaggtcccgcaggcaagcagccgctgtcgcagcggcgactattgccgacatggcccaatcgcgaagaggcaatgtatactgggtgcgtgacgctgccaccggtcaacgtgtacccgtgcgcacccgtccccctcgcacttagaagatactgagcagtctccgatgttgtgtcccagcggcgaggatgtccaagcgcaaatacaaggaagaaatgctgcaggttatcgcacctgaagtctacggccaaccgttgaaggatgaaaaaaaaccccgcaaaatcaagcgggttaaaaaggacaaaaaagaagaggaagatggcgatgatgggctggcggagtttgtgcgcgagtttgccccacggcgacgcgtgcaatggcgtgggcgcaaagttcgacatgtgttgagacctggaacttcggtggtctttacacccggcgagcgttcaagcgctacttttaagcgttcctatgatgaggtgtacggggatgatgatattcttgagcaggcggctgaccgattaggcgagtttgcttatggcaagcgtagtagaataacttccaaggatgagacagtgtcgatacccttggatcatggaaatcccacccctagtcttaaaccggtcactttgcagcaagtgttacccgtaactccgcgaacaggtgttaaacgcgaaggtgaagatttgtatcccactatgcaactgatggtacccaaacgccagaagttggaggacgttttggagaaagtaaaagtggatccagatattcaacctgaggttaaagtgagacccattaagcaggtagcgcctggtctgggggtacaaactgtagacattaagattcccactgaaagtatggaagtgcaaactgaacccgcaaagcctactgccacctccactgaagtgcaaacggatccatggatgcccatgcctattacaactgacgccgccggtcccactcgaagatcccgacgaaagtacggtccagcaagtctgttgatgcccaattatgttgtacacccatctattattcctactcctggttaccgaggcactcgctactatcgcagccgaaacagtacctcccgccgtcgccgcaagacacctgcaaatcgcagtcgtcgccgtagacgcacaagcaaaccgactcccggcgccctggtgcggcaagtgtaccgcaatggtagtgcggaacctttgacactgccgcgtgcgcgttaccatccgagtatcatcacttaatcaatgttgccgctgcctccttgcagatatggccctcacttgtcgccttcgcgttcccatcactggttaccgaggaagaaactcgcgccgtagaagagggatgttgggacgcggaatgcgacgctacaggcgacggcgtgctatccgcaagcaattgcggggtggttttttaccagccttaattccaattatcgctgctgcaattggcgcgataccaggcatagcttccgtggcggttcaggcctcgcaacgacattgacattggaaaaaaacgtataaataaaaaaaaaaaaatacaatggactctgacactcctggtcctgtgactatgttttcttagagatggaagacatcaatttttcatccttggctccgcgacacggcacgaagccgtacatgggcacctggagcgacatcggcacgagccaactgaacgggggcgccttcaattggagcagtatctggagcgggcttaaaaattttggctcaaccataaaaacatacgggaacaaagcttggaacagcagtacaggacaggcgcttagaaataaacttaaagaccagaacttccaacaaaaagtagtcgatgggatagcttccggcatcaatggagtggtagatttggctaaccaggctgtgcagaaaaagataaacagtcgtttggacccgccgccagcaaccccaggtgaaatgcaagtggaggaagaaattcctccgccagaaaaacgaggcgacaagcgtccgcgtcccgatttggaagagacgctggtgacgcgcgtagatgaaccgccttcttatgaggaagcaacgaagcttggaatgcccaccactagaccgatagccccaatggccaccggggtgatgaaaccttctcagttgcatcgacccgtcaccttggatttgccccctccccctgctgctactgctgtacccgcttctaagcctgtcgctgccccgaaaccagtcgccgtagccaggtcacgtcccgggggcgctcctcgtccaaatgcgcactggcaaaatactctgaacagcatcgtgggtctaggcgtgcaaagtgtaaaacgccgtcgctgcttttaattaaatatggagtagcgcttaacttgcctatctgtgtatatgtgtcattacacgccgtcacagcagcagaggaaaaaaggaagaggtcgtgcgtcgacgctgagttactttcaagatggccaccccatcgatgctgccccaatgggcatacatgcacatcgccggacaggatgcttcggagtacctgagtccgggtctggtgcagttcgcccgcgccacagacacctacttcaatctgggaaataagtttagaaatcccaccgtagcgccgacccacgatgtgaccaccgaccgtagccagcggctcatgttgcgcttcgtgcccgttgaccgggaggacaatacatactcttacaaagtgcggtacaccctggccgtgggcgacaacagagtgctggatatggccagcacgttctttgacattaggggtgtgttggacagaggtcccagtttcaaaccctattctggtacggcttacaactccctggctcctaaaggcgctccaaatacatctcagtggattgcagaaggtgtaaaaaatacaactggtgaggaacacgtaacagaagaggaaaccaatactactacttacacttttggcaatgctcctgtaaaagctgaagctgaaattacaaaagaaggactcccagtaggtttggaagtttcagatgaagaaagtaaaccgatttatgctgataaaacatatcagccagaacctcagctgggagatgaaacttggactgaccttgatggaaaaaccgaaaagtatggaggcagggctctcaaacccgatactaagatgaaaccatgctacgggtcctttgccaaacctactaatgtgaaaggcggtcaggcaaaacaaaaaacaacggagcagccaaatcagaaagtcgaatatgatatcgacatggagttttttgatgcggcatcgcagaaaacaaacttaagtcctaaaattgtcatgtatgcagaaaatgtaaatttggaaactccagacactcatgtagtgtacaaacctggaacagaagacacaagttccgaagctaatttgggacaacaatctatgcccaacagacccaactacattggcttcagagataactttattggacttatgtactataacagtactggtaacatgggggtgctggctggtcaagcgtctcagttaaatgcagtggttgacttgcaggacagaaacacagaactttcttaccaactcttgcttgactctctgggcgacagaaccagatactttagcatgtggaatcaggctgtggacagttatgatcctgatgtacgtgttattgaaaatcatggtgtggaagatgaacttcccaactactgttttccactggacggcataggtgttccaacaaccagttacaaatcaatagttccaaatggagacaatgcgcctaattggaaggaacctgaagtaaatggaacaagtgagatcggacagggtaatttgtttgccatggaaattaaccttcaagccaatctatggcgaagtttcctttattccaatgtggctctatatctcccagactcgtacaaatacaccccgtccaatgtcactcttccagaaaacaaaaacacctacgactacatgaacgggcgggtggtgccgccatctctagtagacacctatgtgaacattggtgccaggtggtctctggatgccatggacaatgtcaacccattcaaccaccaccgtaacgctggcttgcgttaccgatccatgcttctgggtaacggacgttatgtgcctttccacatacaagtgcctcaaaaattcttcgctgttaaaaacctgctgcttctcccaggctcctacacttatgagtggaactttaggaaggatgtgaacatggttctacagagttccctcggtaacgacctgcgggtagatggcgccagcatcagtttcacgagcatcaacctctatgctacttttttccccatggctcacaacaccgcttccacccttgaagccatgctgcggaatgacaccaatgatcagtcattcaacgactacctatctgcagctaacatgctctaccccattcctgccaatgcaaccaatattcccatttccattccttctcgcaactgggcggctttcagaggctggtcatttaccagactgaaaaccaaagaaactccctctttggggtctggatttgacccctactttgtctattctggttctattccctacctggatggtaccttctacctgaaccacacttttaagaaggtttccatcatgtttgactcttcagtgagctggcctggaaatgacaggttactatctcctaacgaatttgaaataaagcgcactgtggatggcgaaggctacaacgtagcccaatgcaacatgaccaaagactggttcttggtacagatgctcgccaactacaacatcggctatcagggcttctacattccagaaggatacaaagatcgcatgtattcatttttcagaaacttccagcccatgagcaggcaggtggttgatgaggtcaattacaaagacttcaaggccgtcgccataccctaccaacacaacaactctggctttgtgggttacatggctccgaccatgcgccaaggtcaaccctatcccgctaactatccctatccactcattggaacaactgccgtaaatagtgttacgcagaaaaagttcttgtgtgacagaaccatgtggcgcataccgttctcgagcaacttcatgtctatgggggcccttacagacttgggacagaatatgctctatgccaactcagctcatgctctggacatgacctttgaggtggatcccatggatgagcccaccctgctttatcttctcttcgaagttttcgacgtggtcagagtgcatcagccacaccgcggcatcatcgaggcagtctacctgcgtacaccgttctcggccggtaacgctaccacgtaagaagcttcttgcttcttgcaaatagcagctgcaaccatggcctgcggatcccaaaacggctccagcgagcaagagctcagagccattgtccaagacctgggttgcggaccctattttttgggaacctacgataagcgcttcccggggttcatggcccccgataagctcgcctgtgccattgtaaatacggccggacgtgagacggggggagagcactggttggctttcggttggaacccacgttctaacacctgctacctttttgatccttttggattctcggatgatcgtctcaaacagatttaccagtttgaatatgagggtctcctgcgccgcagcgctcttgctaccaaggaccgctgtattacgctggaaaaatctacccagaccgtgcagggtccccgttctgccgcctgcggacttttctgctgcatgttccttcacgcctttgtgcactggcctgaccgtcccatggacggaaaccccaccatgaaattgctaactggagtgccaaacaacatgcttcattctcctaaagtccagcccaccctgtgtgacaatcaaaaagcactctaccattttcttaatacccattcgccttattttcgctcccatcgtacacacatcgaaagggccactgcgttcgaccgtatggatgttcaataatgactcatgtaaacaacgtgttcaataaacatcactttatttttttacatgtatcaaggctctgcattacttatttatttacaagtcgaatgggttctgacgagaatcagaatgacccgcaggcagtgatacgttgcggaactgatacttgggttgccacttgaattcgggaatcaccaacttgggaaccggtatatcgggcaggatgtcactccacagctttctggtcagctgcaaagctccaagcaggtcaggagccgaaatcttgaaatcacaattaggaccagtgctttgagcgcgagagttgcggtacaccggattgcagcactgaaacaccatcagcgacggatgtctcacgcttgccagcacggtgggatctgcaatcatgcccacatccagatcttcagcattggcaatgctgaacggggtcatcttgcaggtctgcctacccatggcgggcacccaattaggcttgtggttgcaatcgcagtgcagggggatcagtatcatcttggcctgatcctgtctgattcctggatacacggctctcatgaaagcatcatattgcttgaaagcctgctgggctttactaccctcggtataaaacatcccgcaggacctgctcgaaaactggttagctgcacagccggcatcattcacacagcagcgggcgtcattgttagctatttgcaccacacttctgccccagcggttttgggtgattttggttcgctcgggattctcctttaaggctcgttgtccgttctcgctggccacatccatctcgataatctgctccttctgaatcataatattgccatgcaggcacttcagcttgccctcataatcattgcagccatgaggccacaacgcacagcctgtacattcccaattatggtgggcgatctgagaaaaagaatgtatcattccctgcagaaatcttcccatcatcgtgctcagtgtcttgtgactagtgaaagttaactggatgcctcggtgctcctcgtttacgtactggtgacagatgcgcttgtattgttcgtgttgctcaggcattagtttaaaagaggttctaagttcgttatccagcctgtacttctccatcagcagacacatcacttccatgcctttctcccaagcagacaccaggggcaagctaatcggattcttaacagtgcaggcagcagctcctttagccagagggtcatctttagcgatcttctcaatgcttcttttgccatccttctcaacgatgcgcacgggcgggtagctgaaacccactgctacaagttgcgcctcttctctttcttcttcgctgtcttgactgatgtcttgcatggggatatgtttggtcttccttggcttctttttggggggtatcggaggaggaggactgtcgctccgttccggagacagggaggattgtgacgtttcgctcaccattaccaactgactgtcggtagaagaacctgaccccacacggcgacaggtgtttctcttcgggggcagaggtggaggcgattgcgaagggctgcggtccgacctggaaggcggatgactggcagaaccccttccgcgttcgggggtgtgctccctgtggcggtcgcttaactgatttccttcgcggctggccattgtgttctcctaggcagagaaacaacagacatggaaactcagccattgctgtcaacatcgccacgagtgccatcacatctcgtcctcagcgacgaggaaaaggagcagagcttaagcattccaccgcccagtcctgccaccacctctaccctagaagataaggaggtcgacgcatctcatgacatgcagaataaaaaagcgaaagagtctgagacagacatcgagcaagacccgggctatgtgacaccggtggaacacgaggaagagttgaaacgctttctagagagagaggatgaaaactgcccaaaacaacgagcagataactatcaccaagatgctggaaatagggatcagaacaccgactacctcatagggcttgacggggaagacgcgctccttaaacatctagcaagacagtcgctcatagtcaaggatgcattattggacagaactgaagtgcccatcagtgtggaagagctcagccgcgcctacgagcttaacctcttttcacctcgtactccccccaaacgtcagccaaacggcacctgcgagccaaatcctcgcttaaacttttatccagcttttgctgtgccagaagtactggctacctatcacatcttttttaaaaatcaaaaaattccagtctcctgccgcgctaatcgcacccgcgccgatgccctactcaatctgggacctggttcacgcttacctgatatagcttccttggaagaggttccaaagatcttcgagggtctgggcaataatgagactcgggccgcaaatgctctgcaaaagggagaaaatggcatggatgagcatcacagcgttctggtggaattggaaggcgataatgccagactcgcagtactcaagcgaagcatcgaggtcacacacttcgcatatcccgctgtcaacctgccccctaaagtcatgacggcggtcatggaccagttactcattaagcgcgcaagtcccctttcagaagacatgcatgacccagatgcctgtgatgagggtaaaccagtggtcagtgatgagcagctaacccgatggctgggcaccgactctcccagggatttggaagagcgtcgcaagcttatgatggccgtggtgctggttaccgtagaactagagtgtctccgacgtttctttaccgattcagaaaccttgcgcaaactcgaagagaatctgcactacacttttagacacggctttgtgcggcaggcatgcaagatatctaacgtggaactcaccaacctggtttcctacatgggtattctgcatgagaatcgcctaggacaaagcgtgctgcacagcaccctgaagggggaagcccgccgtgattacatccgcgattgtgtctatctgtacctgtgccacacgtggcaaaccggcatgggtgtatggcagcaatgtttagaagaacagaacttgaaagagcttgacaagctcttacagaaatctcttaaggttctgtggacagggttcgacgagcgcaccgtcgcttccgacctggcagacctcatcttcccagagcgtctcagggttactttgcgaaacggattgcctgactttatgagccagagcatgcttaacaattttcgctctttcatcctggaacgctccggtatcctgcccgccacctgctgcgcactgccctccgactttgtgcctctcacctaccgcgagtgccccccgccgctatggagtcactgctacctgttccgtctggccaactatctctcctaccactcggatgtgatcgaggatgtgagcggagacggcttgctggagtgtcactgccgctgcaatctgtgcacgccccaccggtccctagcttgcaacccccagttgatgagcgaaacccagataataggcacctttgaattgcaaggccccagcagccaaggcgatgggtcttctcctgggcaaagtttaaaactgaccccgggactgtggacctccgcctacttgcgcaagtttgctccggaagattaccacccctatgaaatcaagttctatgaggaccaatcacagcctccaaaggccgaactttcggcctgcgtcatcacccagggggcaattctggcccaattgcaagccatccaaaaatcccgccaagaatttctactgaaaaagggtaagggggtctaccttgacccccagaccggcgaggaactcaacacaaggttccctcaggatgtcccaacgacgagaaaacaagaagttgaaggtgcagccgccgcccccagaagatatggaggaagattgggacagtcaggcagaggaggcggaggaggacagtctggaggacagtctggaggaagacagtttggaggaggaaaacgaggaggcagaggaggtggaagaagtaaccgccgacaaacagttatcctcggctgcggagacaagcaacagcgctaccatctccgctccgagtcgaggaacccggcggcgtcccagcagtagatgggacgagaccggacgcttcccgaacccaaccagcgcttccaagaccggtaagaaggatcggcagggatacaagtcctggcgggggcataagaatgccatcatctcctgcttgcatgagtgcgggggcaacatatccttcacgcggcgctacttgctattccaccatggggtgaactttccgcgcaatgttttgcattactaccgtcacctccacagcccctactatagccagcaaatcccggcagtctcgacagataaagacagcggcggcgacctccaacagaaaaccagcagcggcagttagaaaatacacaacaagtgcagcaacaggaggattaaagattacagccaacgagccagcgcaaacccgagagttaagaaatcggatctttccaaccctgtatgccatcttccagcagagtcggggtcaagagcaggaactgaaaataaaaaaccgatctctgcgttcgctcaccagaagttgtttgtatcacaagagcgaagatcaacttcagcgcactctcgaggacgccgaggctctcttcaacaagtactgcgcgctgactcttaaagagtaggcagcgaccgcgcttattcaaaaaaggcgggaattacatcatcctcgacatgagtaaagaaattcccacgccttacatgtggagttatcaaccccaaatgggattggcggcaggcgcctcccaggactactccacccgcatgaattggctcagcgccgggccttctatgatttctcgagttaatgatatacgcgcctaccgaaaccaaatacttttggaacagtcagctcttaccaccacgccccgccaacaccttaatcccagaaattggcccgccgccctagtgtaccaggaaagtcccgctcccaccactgtattacttcctcgagacgcccaggccgaagtccaaatgactaatgcaggtgcgcagttagctggcggctccaccctatgtcgtcacaggcctcggcataatataaaacgcctgatgatcagaggccgaggtatccagctcaacgacgagtcggtgagctctccgcttggtctacgaccagacggaatctttcagattgccggctgcgggagatcttccttcacccctcgtcaggctgttctgactttggaaagttcgtcttcgcaaccccgctcgggcggaatcgggaccgttcaatttgtggaggagtttactccctctgtctacttcaaccccttctccggatctcctgggcattacccggacgagttcataccgaacttcgacgcgattagcgagtcagtggacggctacgattgatgtctggtgacgcggctgagctatctcggctgcgacatctagaccactgccgccgctttcgctgctttgcccgggaactcattgagttcatctacttcgaactccccaaggatcaccctcaaggtccggcccacggagtgcggatttctatcgaaggcaaaatagactctcgcctgcaacgaattttctcccagcggcccgtgctgatcgagcgagaccagggaaacaccacggtttccatctactgcatttgtaatcaccccggattgcatgaaagcctttgctgtcttatgtgtactgagtttaataaaaactgaattaagactctcctacggactgccgcttcttcaacccggattttacaaccagaagaacgaaacttttcctgtcgtccaggactctgttaacttcacctttcctactcacaaactagaagctcaacgactacaccgcttttccagaagcattttccctactaatactactttcaaaaccggaggtgagctccaaggtcttcctacagaaaacccttgggtggaagcgggccttgtagtgctaggaattcttgcgggtgggcttgtgattattctttgctacctatacacaccttgcttcactttcttagtggtgttgtggtattggtttaaaaaatggggcccatactagtcttgcttgttttactttcgcttttggaaccgggttctgccaattacgatccatgtctagacttcgacccagaaaactgcacacttacttttgcacccgacacaagccgcatctgtggagttcatcgcctctcttacgaacttggcccccaacgacaaaaatttacctgcatggtgggaatcaaccccatagttatcacccagcaaagtggagatactaagggttgcattcactgctcctgcgattccatcgagtgcacctacaccctgctgaagaccctatgcggcctaagagacctgctaccaatgaattaaaaaatgattaataaaaaatcacttacttgaaatcagcaataaggtctctgttgaaattttctcccagcagcacctcacttccctcttcccaactctggtattctaaaccccgttcagcggcatactttctccatactttaaaggggatgtcaaattttagctcctctcctgtacccacaatcttcatgtctttcttcccagatgaccaagagagtccggctcagtgactccttcaaccctgtctacccctatgaagatgaaagcacctcccaacacccctttataaacccagggtttatttccccaaatggcttcacacaaagcccaaacggagttcttactttaaaatgtttaaccccactaacaaccacaggcggatctctacagctaaaagtgggagggggacttacagtggatgacaccaacggttttttgaaagaaaacataagtgccaccacaccactcgttaagactggtcactctataggtttaccactaggagccggattgggaacgaatgaaaataaactttgtatcaaattaggacaaggacttacattcaattcaaacaacatttgcattgatgacaatattaacaccttatggacaggagtcaaccccaccgaagccaactgtcaaatcatgaactccagtgaatctaatgattgcaaattaattctaacactagttaaaactggagcactagtcactgcatttgtttatgttataggagtatctaacaattttaatatgctaactacacacagaaatataaattttactgcagagctgtttttcgattctactggtaatttactaactagactctcatccctcaaaactccacttaatcataaatcaggacaaaacatggctactggtgccattactaatgctaaaggtttcatgcccagcacgactgcctatcctttcaatgataattctagagaaaaagaaaactacatttacggaacttgttactacacagctagtgatcgcactgcttttcccattgacatatctgtcatgcttaaccgaagagcaataaatgacgagacatcatattgtattcgtataacttggtcctggaacacaggagatgccccagaggtgcaaacctctgctacaaccctagtcacctccccatttaccttttactacatcagagaagacgactgacaaataaagtttgcgatcgcggctcccgccagatctagtaatcaattacggggtcattagttcatagcccatatatggagttccgcgttacataacttacggtaaatggcccgcctggctgaccgcccaacgacccccgcccattgacgtcaataatgacgtatgttcccatagtaacgccaatagggactttccattgacgtcaatgggtggagtatttacggtaaactgcccacttggcagtacatcaagtgtatcatatgccaagtacgccccctattgacgtcaatgacggtaaatggcccgcctggcattatgcccagtacatgaccttatgggactttcctacttggcagtacatctacgtattagtcatcgctattaccatgctgatgcggttttggcagtacatcaatgggcgtggatagcggtttgactcacggggatttccaagtctccaccccattgacgtcaatgggagtttgttttggcaccaaaatcaacgggactttccaaaatgtcgtaacaactccgccccattgacgcaaatgggcggtaggcgtgtacggtgggaggtctatataagcagagctggtttagtgaaccgtcagatcagatctttgtcgatcctaccatccactcgacacacccgccagcggccgctgccaagcttccgagctctcgaattcaaaggaggtacccaccatggccttgacctttgctttactggtggccctcctggtgctcagctgcaagtcaagctgctctgtgggctgtgatctgcctcaaacccacagcctgggtagcaggaggaccttgatgctcctggcacagatgaggagaatctctcttttctcctgcttgaaggacagacatgactttggatttccccaggaggagtttggcaaccagttccaaaaggctgaaaccatccctgtcctccatgagatgatccagcagatcttcaatctcttcagcacaaaggactcatctgctgcttgggatgagaccctcctagacaaattctacactgaactctaccagcagctgaatgacctggaagcctgtgtgatacagggggtgggggtgacagagactcccctgatgaaggaggactccattctggctgtgaggaaatacttccaaagaatcactctctatctgaaagagaagaaatacagcccttgtgcctgggaggttgtcagagcagaaatcatgagatctttttctttgtcaacaaacttgcaagaaagtttaagaagtaaggaatgagctagcttgactgactgagatacagcgtaccttcagctcacagacatgataagatacattgatgagtttggacaaaccacaactagaatgcagtgaaaaaaatgctttatttgtgaaatttgtgatgctattgctttatttgtaaccattataagctgcaataaacaagttaacaacaacaattgcattcattttatgtttcaggttcagggggaggtgtgggaggttttttaaagcaagtaaaacctctacaaatgtggtagtcgtcagctatcctgcaggaacttgtttatttgaaaatcaattcacaaaatccgagtagttattttgcctcccccttcccatttaacagaatacaccaatctctccccacgcacagctttaaacatttggataccattagatatagacatggttttagattccacattccaaacagtttcagagcgagccaatctggggtcagtgatagataaaaatccatcgggatagtcttttaaagcgctttcacagtccaactgctgcggatgcgactccggagtctggatcacggtcatctggaagaagaacgatgggaatcataatccgaaaacggtatcggacgattgtgtctcatcaaacccacaagcagccgctgtctgcgtcgctccgtgcgactgctgtttatgggatcagggtccacagtgtcctgaagcatgattttaatagcccttaacatcaactttctggtgcgatgcgcgcagcaacgcattctgatttcactcaaatctttgcagtaggtacaacacattattacaatattgtttaataaaccataattaaaagcgctccagccaaaactcatatctgatataatcgcccctgcatgaccatcataccaaagtttaatataaattaaatgacgttccctcaaaaacacactacccacatacatgatctcttttggcatgtgcatattaacaatctgtctgtaccatggacaacgttggttaatcatgcaacccaatataaccttccggaaccacactgccaacaccgctcccccagccatgcattgaagtgaaccctgctgattacaatgacaatgaagaacccaattctctcgaccgtgaatcacttgagaatgaaaaatatctatagtggcacaacatagacataaatgcatgcatcttctcataatttttaactcctcaggatttagaaacatatcccagggaataggaagctcttgcagaacagtaaagctggcagaacaaggaagaccacgaacacaacttacactatgcatagtcatagtatcacaatctggcaacagcgggtggtcttcagtcatagaagctcgggtttcattttcctcacaacgtggtaactgggctctggtgtaagggtgatgtctggcgcatgatgtcgagcgtgcgcgcaaccttgtcataatggagttgcttcctgacattctcgtattttgtatagcaaaacgcggccctggcagaacacactcttcttcgccttctatcctgccgcttagcgtgttccgtgtgatagttcaagtacaaccacactcttaagttggtcaaaagaatgctggcttcagttgtaatcaaaactccatcgcatctaatcgttctgaggaaatcatccaagcaatgcaactggattgtgtttcaagcaggagaggagagggaagagacggaagaaccatgttaatttttattccaaacgatctcgcagtacttcaaattgtagatcgcgcagatggcatctctcgcccccactgtgttggtgaaaaagcacagctagatcaaaagaaatgcgattttcaaggtgctcaacggtggcttccagcaaagcctccacgcgcacatccaagaacaaaagaataccaaaagaaggagcattttctaactcctcaatcatcatattacattcctgcaccattcccagataattttcagctttccagccttgaattattcgtgtcagttcttgtggtaaatccaatccacacattacaaacaggtcccggagggcgccctccaccaccattcttaaacacaccctcataatgacaaaatatcttgctcctgtgtcacctgtagcgaattgagaatggcaacatcaattgacatgcccttggctctaagttcttctttaagttctagttgtaaaaactctctcatattatcaccaaactgcttagccagaagccccccgggaacaagagcaggggacgctacagtgcagtacaagcgcagacctccccaattggctccagcaaaaacaagattggaataagcatattgggaaccgccagtaatatcatcgaagttgctggaaatataatcaggcagagtttcttgtaaaaattgaataaaagaaaaatttgccaaaaaaacattcaaaacctctgggatgcaaatgcaataggttaccgcgctgcgctccaacattgttagttttgaattagtctgcaaaaataaaaaaaaaaacaagcgtcatatcatagtagcctgacgaacagatggataaatcagtctttccatcacaagacaagccacagggtctccagctcgaccctcgtaaaacctgtcatcatgattaaacaacagcaccgaaagttcctcgcggtgaccagcatgaataattcttgatgaagcatacaatccagacatgttagcatcagttaacgagaaaaaacagccaacatagcctttgggtataattatgcttaatcgtaagtatagcaaagccacccctcgcggatacaaagtaaaaggcacaggagaataaaaaatataattatttctctgctgctgttcaggcaacgtcgcccccggtccctctaaatacacatacaaagcctcatcagccatggcttaccagacaaagtacagcgggcacacaaagcacaagctctaaagtgactctccaacctctccacaatatatatatacacaagccctaaactgacgtaatgggagtaaagtgtaaaaaatcccgccaaacccaacacacaccccgaaactgcgtcaccagggaaaagtacagtttcacttccgcaatcccaacaggcgtaacttcctctttctcacggtacgtgatatcccactaacttgcaacgtcattttcccacggtcgcaccgccccttttagccgttaaccccacagccaatcaccacacgatccacactttttaaaatcacctcatttacatattggcaccattccatctataaggtatattatatagataga

SEQ ID NO: 51 - DNA, 33132 bp, Artificial Sequence
  NG-92 virus genome sequence consisting of a transgene cassette that encodes the cytokine, IFN?, inserted in the region BY.
tctatctatataatataccttatagatggaatggtgccaatatgtaaatgaggtgattttaaaaagtgtggatcgtgtggtgattggctgtggggttaacggctaaaaggggcggtgcgaccgtgggaaaatgacgttttgtgggggtggagtttttttgcaagttgtcgcgggaaatgtgacgcataaaaaggcttttttctcacggaactacttagttttcccacggtatttaacaggaaatgaggtagttttgaccggatgcaagtgaaaattgttgattttcgcgcgaaaactgaatgaggaagtgtttttctgaataatgtggtatttatggcagggtggagtatttgttcagggccaggtagactttgacccattacgtggaggtttcgattaccgtgttttttacctgaatttccgcgtaccgtgtcaaagtcttctgtttttacgtaggtgtcagctgatcgctagggtatttatacctcagggtttgtgtcaagaggccactcttgagtgccagcgagaagagttttctcctctgcgccggcagtttaataataaaaaaatgagagatttgcgatttctgcctcaggaaataatctctgctgagactggaaatgaaatattggagcttgtggtgcacgccctgatgggagacgatccggagccacctgtgcagctttttgagcctcctacgcttcaggaactgtatgatttagaggtagagggatcggaggattctaatgaggaagctgtaaatggcttttttaccgattctatgcttttagctgctaatgaagggttagaattagatccgcctttggacacttttgatactccaggggtaattgtggaaagcggtacaggtgtaagaaaattacctgatttgagttccgtggactgtgatttgcactgctatgaagacgggtttcctccgagtgatgaggaggaccatgaaaaggagcagtccatgcagactgcagcgggtgagggagtgaaggctgccaatgttggttttcagttggattgcccggagcttcctggacatggctgtaagtcttgtgaatttcacaggaaaaatactggagtaaaggaactgttatgttcgctttgttatatgagaacgcactgccactttatttacagtaagtgtgtttaagttaaaatttaaaggaatatgctgtttttcacatgtatattgagtgtgagttttgtgcttcttattataggtcctgtgtctgatgctgatgaatcaccatctcctgattctactacctcacctcctgagattcaagcacctgttcctgtggacgtgcgcaagcccattcctgtgaagcttaagcctgggaaacgtccagcagtggaaaaacttgaggacttgttacagggtggggacggacctttggacttgagtacacggaaacgtccaagacaataagtgttccatatccgtgtttacttaaggtgacgtcaatatttgtgtgacagtgcaatgtaataaaaatatgttaactgttcactggtttttattgctttttgggcggggactcaggtatataagtagaagcagacctgtgtggttagctcataggagctggctttcatccatggaggtttgggccattttggaagaccttaggaagactaggcaactgttagagaacgcttcggacggagtctccggtttttggagattctggttcgctagtgaattagctagggtagtttttaggataaaacaggactataaacaagaatttgaaaagttgttggtagattgcccaggactttttgaagctcttaatttgggccatcaggttcactttaaagaaaaagttttatcagttttagacttttcaaccccaggtagaactgctgctgctgtggcttttcttacttttatattagataaatggatcccgcagactcatttcagcaggggatacgttttggatttcatagccacagcattgtggagaacatggaaggttcgcaagatgaggacaatcttaggttactggccagtgcagcctttgggtgtagcgggaatcctgaggcatccaccggtcatgccagcggttctggaggaggaacagcaagaggacaacccgagagccggcctggaccctccagtggaggaggcggagtagctgacttgtctcctgaactgcaacgggtgcttactggatctacgtccactggacgggataggggcgttaagagggagagggcatctagtggtactgatgctagatctgagttggctttaagtttaatgagtcgcagacgtcctgaaaccatttggtggcatgaggttcagaaagagggaagggatgaagtttctgtattgcaggagaaatattcactggaacaggtgaaaacatgttggttggagcctgaggatgattgggaggtggccattaaaaattatgccaagatagctttgaggcctgataaacagtataagattactagacggattaatatccggaatgcttgttacatatctggaaatggggctgaggtggtaatagatactcaagacaaggcagttattagatgctgcatgatggatatgtggcctggggtagtcggtatggaagcagtaacttttgtaaatgttaagtttaggggagatggttataatggaatagtgtttatggccaataccaaacttatattgcatggttgtagcttttttggtttcaacaatacctgtgtagatgcctggggacaggttagtgtacggggatgtagtttctatgcgtgttggattgccacagctggcagaaccaagagtcaattgtctctgaagaaatgcatatttcaaagatgtaacctgggcattctgaatgaaggcgaagcaagggtccgccactgcgcttctacagatactggatgttttattttgattaagggaaatgccagcgtaaagcataacatgatttgcggtgcttccgatgagaggccttatcaaatgctcacttgtgctggtgggcattgtaatatgctggctactgtgcatattgtttcccatcaacgcaaaaaatggcctgtttttgatcacaatgtgatgacgaagtgtaccatgcatgcaggtgggcgtagaggaatgtttatgccttaccagtgtaacatgaatcatgtgaaagtgttgttggaaccagatgccttttccagaatgagcctaacaggaatttttgacatgaacatgcaaatctggaagatcctgaggtatgatgatacgagatcgagggtacgcgcatgcgaatgcggaggcaagcatgccaggttccagccggtgtgtgtagatgtgactgaagatctcagaccggatcatttggttattgcccgcactggagcagagttcggatccagtggagaagaaactgactaaggtgagtattgggaaaactttggggtgggattttcagatggacagattgagtaaaaatttgttttttctgtcttgcagctgtcatgagtggaaacgcttcttttaaggggggagtcttcagcccttatctgacagggcgtctcccatcctgggcaggagttcgtcagaatgttatgggatctactgtggatggaagacccgtccaacccgccaattcttcaacgctgacctatgctactttaagttcttcacctttggacgcagctgcagctgccgccgccgcttctgttgccgctaacactgtgcttggaatgggttactatggaagcatcatggctaattccacttcctctaataacccttctaccctgactcaggacaagttacttgtccttttggcccagctggaggctttgacccaacgtctgggtgaactttctcagcaggtggtcgagttgcgagtacaaactgagtctgctgtcggcacggcaaagtctaaataaaaaaatcccagaatcaatgaataaataaacaagcttgttgttgatttaaaatcaagtgtttttatttcatttttcgcgcacggtatgccctagaccaccgatctctatcattgagaactcggtggattttttccaggatcctatagaggtgggattgaatgtttagatacatgggcattaggccgtctttggggtggagatagctccattgaagggattcatgctccggggtagtgttgtaaatcacccagtcataacaaggtcgcagtgcatggtgttgcacaatatcttttagaagtaggctgattgccacagataagcccttggtgtaggtgtttacaaaccggttgagctgggatgggtgcattcggggtgaaattatgtgcattttggattggatttttaagttggcaatattgccgccaagatcccgtcttgggttcatgttatgaaggaccaccaagacggtgtatccggtacatttaggaaatttatcgtgcagcttggatggaaaagcgtggaaaaatttggagacacccttgtgtcctccaagattttccatgcactcatccatgataatagcaatggggccgtgggcagcggcgcgggcaaacacgttccgtgggtctgacacatcatagttatgttcctgagttaaatcatcataagccattttaatgaatttggggcggagagtaccagattggggtatgaatgttccttcgggccccggagcatagttcccctcacagatttgcatttcccaagctttcagttccgagggtggaatcatgtccacctggggggctatgaaaaacaccgtttctggggcgggggtgattaattgtgatgatagcaaatttctgagcaattgagatttgccacatccggtggggccataaatgattccgattacgggttgcaggtggtagtttagggaacggcaactgccgtcttctcgaagcaagggggccacctcgttcatcatttcccttacatgcatattttcccgcaccaaatccattaggaggcgctctcctcctagtgatagaagttcttgtagtgaggaaaagtttttcagcggtttcagaccgtcagccatgggcattttggagagagtttgctgcaaaagttctagtctgttccacagttcagtgatgtgttctatggcatctcgatccagcagacctcctcgtttcgcgggtttggacggctcctggaatagggtatgagacgatgggcgtccagcgctgccagggttcggtccttccagggtctcagtgttcgagtcagggttgtttccgtcacagtgaaggggtgtgcgcctgcttgggcgcttgccagggtgcgcttcagactcatcctgctggtcgaaaacttctgtcgcttggcgccctgtatgtcggccaagtagcagtttaccatgagttcgtagttgagcgcctcggctgcgtggcctttggcgcggagcttacctttggaagttttcttgcataccgggcagtataggcatttcagcgcatacaacttgggcgcaaggaaaacggattctggggagtatgcatctgcgccgcaggaggcgcaaacagtttcacattccaccagccaggttaaatccggttcattggggtcaaaaacaagttttccgccatattttttgatgcgtttcttacctttggtctccatgagttcgtgtcctcgttgagtgacaaacaggctgtccgtgtccccgtagactgattttacaggcctcttctccagtggagtgcctcggtcttcttcgtacaggaactctgaccactctgatacaaaggcgcgcgtccaggccagcacaaaggaggctatgtgggaggggtagcgatcgttgtcaaccagggggtccaccttttccaaagtatgcaaacacatgtcaccctcttcaacatccaggaatgtgattggcttgtaggtgtatttcacgtgacctggggtccccgctgggggggtataaaagggggcggttctttgctcttcctcactgtcttccggatcgctgtccaggaacgtcagctgttggggtaggtattccctctcgaaggcgggcatgacctctgcactcaggttgtcagtttctaagaacgaggaggatttgatattgacagtgccggttgagatgcctttcatgaggttttcgtccatctggtcagaaaacacaatttttttattgtcaagtttggtggcaaatgatccatacagggcgttggataaaagtttggcaatggatcgcatggtttggttcttttccttgtccgcgcgctctttggcggcgatgttgagttggacatactcgcgtgccaggcacttccattcggggaagatagttgttaattcatctggcacgattctcacttgccaccctcgattatgcaaggtaattaaatccacactggtggccacctcgcctcgaaggggttcattggtccaacagagcctacctcctttcctagaacagaaagggggaagtgggtctagcataagttcatcgggagggtctgcatccatggtaaagattcccggaagtaaatccttatcaaaatagctgatgggagtggggtcatctaaggccatttgccattctcgagctgccagtgcgcgctcatatgggttaaggggactgccccatggcatgggatgggtgagtgcagaggcatacatgccacagatgtcatagacgtagatgggatcctcaaagatgcctatgtaggttggatagcatcgcccccctctgatacttgctcgcacatagtcatatagttcatgtgatggcgctagcagccccggacccaagttggtgcgattgggtttttctgttctgtagacgatctggcgaaagatggcgtgagaattggaagagatggtgggtctttgaaaaatgttgaaatgggcatgaggtagacctacagagtctctgacaaagtgggcataagattcttgaagcttggttaccagttcggcggtgacaagtacgtctagggcgcagtagtcaagtgtttcttgaatgatgtcataacctggttggtttttcttttcccacagttcgcggttgagaaggtattcttcgcgatccttccagtactcttctagcggaaacccgtctttgtctgcacggtaagatcctagcatgtagaactgattaactgccttgtaagggcagcagcccttctctacgggtagagagtatgcttgagcagcttttcgtagcgaagcgtgagtaagggcaaaggtgtctctgaccatgactttgaggaattggtatttgaagtcgatgtcgtcacaggctccctgttcccagagttggaagtctacccgtttcttgtaggcggggttgggcaaagcgaaagtaacatcattgaagagaatcttgccggccctgggcatgaaattgcgagtgatgcgaaaaggctgtggtacttccgctcggttattgataacctgggcagctaggacgatctcgtcgaaaccgttgatgttgtgtcctacgatgtataattctatgaaacgcggcgtgcctctgacgtgaggtagcttactgagctcatcaaaggttaggtctgtggggtcagataaggcgtagtgttcgagagcccattcgtgcaggtgaggattcgctttaaggaaggaggaccagaggtccactgccagtgctgtttgtaactggtcccggtactgacgaaaatgccgtccgactgccattttttctggggtgacgcaatagaaggtttgggggtcctgccgccagcgatcccacttgagttttatggcgaggtcataggcgatgttgacgagccgctggtctccagagagtttcatgaccagcatgaaggggattagctgcttgccaaaggaccccatccaggtgtaggtttccacatcgtaggtgagaaagagcctttctgtgcgaggatgagagccaatcgggaagaactggatctcctgccaccagttggaggaatggctgttgatgtgatggaagtagaactccctgcgacgcgccgagcattcatgcttgtgcttgtacagacggccgcagtagtcgcagcgttgcacgggttgtatctcgtgaatgagttgtacctggcttcccttgacgagaaatttcagtgggaagccgaggcctggcgattgtatctcgtgctttactatgttgtctgcatcggcctgttcatcttctgtctcgatggtggtcatgctgacgagccctcgcgggaggcaagtccagacctcggcgcggcaggggcggagctcgaggacgagagcgcgcaggctggagctgtccagggtcctgagacgctgcggactcaggttagtaggcagtgtcaggagattaacttgcatgatcttttggagggcgtgcgggaggttcagatagtacttgatctcaacgggtccgttggtggagatgtcgatggcttgcagggttccgtgtcccttgggcgctaccaccgtgcccttgtttttcattttggacggcggtggctctgttgcttcttgcatgtttagaagcggtgtcgagggcgcgcaccgggcggcaggggcggctcgggacccggcggcatggctggcagtggtacgtcggcgccgcgcgcgggtaggttctggtactgcgccctgagaagactcgcatgcgcgacgacgcggcggttgacatcctggatctgacgcctctgggtgaaagctaccggccccgtgagcttgaacctgaaagagagttcaacagaatcaatctcggtatcgttgacggcggcttgcctaaggatttcttgcacgtcaccagagttgtcctggtaggcgatctccgccatgaactgctcgatctcttcctcttgaagatctccgcggcccgctctctcgacggtggccgcgaggtcgttggagatgcgcccaatgagttgagagaatgcattcatgcccgcctcgttccagacgcggctgtagaccacggcccccacgggatctctcgcgcgcatgaccacctgggcgaggttgagctccacgtggcgggtgaagaccgcatagttgcataggcgctggaaaaggtagttgagtgtggtggcgatgtgctcggtgacgaagaaatacatgatccatcgtctcagcggcatctcgctgacatcgcccagagcttccaagcgctccatggcctcgtagaagtccacggcaaaattaaaaaactgggagtttcgcgcggacacggtcaactcctcttccagaagacggataagttcggcgatggtggtgcgcacctcgcgctcgaaagcccctgggatttcttcctcaatctcttcttcttccactaacatctcttcctcttcaggtggggctgcaggaggagggggaacgcggcgacgccggcggcgcacgggcagacggtcgatgaatctttcaatgacctctccgcggcggcggcgcatggtttcagtgacggcgcggccgttctcgcgcggtcgcagagtaaaaacaccgccgcgcatctccttaaagtggtgactgggaggttctccgtttgggagggagagggcgctgattatacattttattaattggcccgtagggactgcacgcagagatctgatcgtgtcaagatccacgggatctgaaaacctttcgacgaaagcgtctaaccagtcacagtcacaaggtaggctgagtacggcttcttgtgggcgggggtggttatgtgttcggtctgggtcttctgtttcttcttcatctcgggaaggtgagacgatgctgctggtgatgaaattaaagtaggcagttctaagacggcggatggtggcgaggagcaccaggtctttgggtccggcttgctggatacgcaggcgattggccattccccaagcattatcctgacatctagcaagatctttgtagtagtcttgcatgagccgttctacgggcacttcttcctcacccgttctgccatgcatacgtgtgagtccaaatccgcgcattggttgtaccagtgccaagtcagctacgactctttcggcgaggatggcttgctgtacttgggtaagggtggcttgaaagtcatcaaaatccacaaagcggtggtaagctcctgtattaatggtgtaagcacagttggccatgactgaccagttaactgtctggtgaccagggcgcacgagctcggtgtatttaaggcgcgaataggcgcgggtgtcaaagatgtaatcgttgcaggtgcgcaccagatactggtaccctataagaaaatgcggcggtggttggcggtagagaggccatcgttctgtagctggagcgccaggggcgaggtcttccaacataaggcggtgatagccgtagatgtacctggacatccaggtgattcctgcggcggtagtagaagcccgaggaaactcgcgtacgcggttccaaatgttgcgtagcggcatgaagtagttcattgtaggcacggtttgaccagtgaggcgcgcgcagtcattgatgctctatagacacggagaaaatgaaagcgttcagcgactcgactccgtagcctggaggaacgtgaacgggttgggtcgcggtgtaccccggttcgagacttgtactcgagccggccggagccgcggctaacgtggtattggcactcccgtctcgacccagcctacaaaaatccaggatacggaatcgagtcgttttgctggtttccgaatggcagggaagtgagtcctattttttttttttgccgctcagatgcatcccgtgctgcgacagatgcgcccccaacaacagcccccctcgcagcagcagcagcagcaatcacaaaaggctgtccctgcaactactgcaactgccgccgtgagcggtgcgggacagcccgcctatgatctggacttggaagagggcgaaggactggcacgtctaggtgcgccttcacccgagcggcatccgcgagttcaactgaaaaaagattctcgcgaggcgtatgtgccccaacagaacctatttagagacagaagcggcgaggagccggaggagatgcgagcttcccgctttaacgcgggtcgtgagctgcgtcacggtttggaccgaagacgagtgttgcgggacgaggatttcgaagttgatgaaatgacagggatcagtcctgccagggcacacgtggctgcagccaaccttgtatcggcttacgagcagacagtaaaggaagagcgtaacttccaaaagtcttttaataatcatgtgcgaaccctgattgcccgcgaagaagttacccttggtttgatgcatttgtgggatttgatggaagctatcattcagaaccctactagcaaacctctgaccgcccagctgtttctggtggtgcaacacagcagagacaatgaggctttcagagaggcgctgctgaacatcaccgaacccgaggggagatggttgtatgatcttatcaacattctacagagtatcatagtgcaggagcggagcctgggcctggccgagaaggtggctgccatcaattactcggttttgagcttgggaaaatattacgctcgcaaaatctacaagactccatacgttcccatagacaaggaggtgaagatagatgggttctacatgcgcatgacgctcaaggtcttgaccctgagcgatgatcttggggtgtatcgcaatgacagaatgcatcgcgcggttagcgccagcaggaggcgcgagttaagcgacagggaactgatgcacagtttgcaaagagctctgactggagctggaaccgagggtgagaattacttcgacatgggagctgacttgcagtggcagcctagtcgcagggctctgagcgccgcgacggcaggatgtgagcttccttacatagaagaggcggatgaaggcgaggaggaagagggcgagtacttggaagactgatggcacaacccgtgttttttgctagatggaacagcaagcaccggatcccgcaatgcgggcggcgctgcagagccagccgtccggcattaactcctcggacgattggacccaggccatgcaacgtatcatggcgttgacgactcgcaaccccgaagcctttagacagcaaccccaggccaaccgtctatcggccatcatggaagctgtagtgccttcccgctctaatcccactcatgagaaggtcctggccatcgtgaacgcgttggtggagaacaaagctattcgtccagatgaggccggactggtatacaacgctctcttagaacgcgtggctcgctacaacagtagcaatgtgcaaaccaatttggaccgtatgataacagatgtacgcgaagccgtgtctcagcgcgaaaggttccagcgtgatgccaacctgggttcgctggtggcgttaaatgctttcttgagtactcagcctgctaatgtgccgcgtggtcaacaggattatactaactttttaagtgctttgagactgatggtatcagaagtacctcagagcgaagtgtatcagtccggtcctgattacttctttcagactagcagacagggcttgcagacggtaaatctgagccaagcttttaaaaaccttaaaggtttgtggggagtgcatgccccggtaggagaaagagcaaccgtgtctagcttgttaactccgaactcccgcctattattactgttggtagctcctttcaccgacagcggtagcatcgaccgtaattcctatttgggttacctactaaacctgtatcgcgaagccatagggcaaagtcaggtggacgagcagacctatcaagaaattacccaagtcagtcgcgctttgggacaggaagacactggcagtttggaagccactctgaacttcttgcttaccaatcggtctcaaaagatccctcctcaatatgctcttactgcggaggaggagaggatccttagatatgtgcagcagagcgtgggattgtttctgatgcaagagggggcaactccgactgcagcactggacatgacagcgcgaaatatggagcccagcatgtatgccagtaaccgacctttcattaacaaactgctggactacttgcacagagctgccgctatgaactctgattatttcaccaatgccatcttaaacccgcactggctgcccccacctggtttctacacgggcgaatatgacatgcccgaccctaatgacggatttctgtgggacgacgtggacagcgatgttttttcacctctttctgatcatcgcacgtggaaaaaggaaggcggcgatagaatgcattcttctgcatcgctgtccggggtcatgggtgctaccgcggctgagcccgagtctgcaagtccttttcctagtctacccttttctctacacagtgtacgtagcagcgaagtgggtagaataagtcgcccgagtttaatgggcgaagaggagtatctaaacgattccttgctcagaccggcaagagaaaaaaatttcccaaacaatggaatagaaagtttggtggataaaatgagtagatggaagacttatgctcaggatcacagagacgagcctgggatcatggggattacaagtagagcgagccgtagacgccagcgccatgacagacagaggggtcttgtgtgggacgatgaggattcggccgatgatagcagcgtgctggacttgggtgggagaggaaggggcaacccgtttgctcatttgcgccctcgcttgggtggtatgttgtaaaaaaaaataaaaaaaaaactcaccaaggccatggcgacgagcgtacgttcgttcttctttattatctgtgtctagtataatgaggcgagtcgtgctaggcggagcggtggtgtatccggagggtcctcctccttcgtacgagagcgtgatgcagcagcagcaggcgacggcggtgatgcaatccccactggaggctccctttgtgcctccgcgatacctggcacctacggagggcagaaacagcattcgttattcggaactggcacctcagtacgataccaccaggttgtatctggtggacaacaagtcggcggacattgcttctctgaactatcagaatgaccacagcaacttcttgaccacggtggtgcaaaacaatgactttacccctacggaagccagcacccagaccattaactttgatgaacgatcgcggtggggcggtcagctaaagaccatcatgcatactaacatgccaaacgtgaacgagtatatgtttagtaacaagttcaaagcgcgtgtgatggtgtccagaaaacctcccgacggtgctgcagttggggatacttatgatcacaagcaggatattttgaaatatgagtggttcgagtttactttgccagaaggcaacttttcagttactatgactattgatttgatgaacaatgccatcatagataattacttgaaagtgggtagacagaatggagtgcttgaaagtgacattggtgttaagttcgacaccaggaacttcaagctgggatgggatcccgaaaccaagttgatcatgcctggagtgtatacgtatgaagccttccatcctgacattgtcttactgcctggctgcggagtggattttaccgagagtcgtttgagcaaccttcttggtatcagaaaaaaacagccatttcaagagggttttaagattttgtatgaagatttagaaggtggtaatattccggccctcttggatgtagatgcctatgagaacagtaagaaagaacaaaaagccaaaatagaagctgctacagctgctgcagaagctaaggcaaacatagttgccagcgactctacaagggttgctaacgctggagaggtcagaggagacaattttgcgccaacacctgttccgactgcagaatcattattggccgatgtgtctgaaggaacggacgtgaaactcactattcaacctgtagaaaaagatagtaagaatagaagctataatgtgttggaagacaaaatcaacacagcctatcgcagttggtatctttcgtacaattatggcgatcccgaaaaaggagtgcgttcctggacattgctcaccacctcagatgtcacctgcggagcagagcaggtctactggtcgcttccagacatgatgaaggatcctgtcactttccgctccactagacaagtcagtaactaccctgtggtgggtgcagagcttatgcccgtcttctcaaagagcttctacaacgaacaagctgtgtactcccagcagctccgccagtccacctcgcttacgcacgtcttcaaccgctttcctgagaaccagattttaatccgtccgccggcgcccaccattaccaccgtcagtgaaaacgttcctgctctcacagatcacgggaccctgccgttgcgcagcagtatccggggagtccaacgtgtgaccgttactgacgccagacgccgcacctgtccctacgtgtacaaggcactgggcatagtcgcaccgcgcgtcctttcaagccgcactttctaaaaaaaaaaaaaatgtccattcttatctcgcccagtaataacaccggttggggtctgcgcgctccaagcaagatgtacggaggcgcacgcaaacgttctacccaacatcctgtccgtgttcgcggacattttcgcgctccatggggcgccctcaagggccgcactcgcgttcgaaccaccgtcgatgatgtaatcgatcaggtggttgccgacgcccgtaattatactcctactgcgcctacatctactgtggatgcagttattgacagtgtagtggctgacgctcgcaactatgctcgacgtaagagccggcgaaggcgcattgccagacgccaccgagctaccactgccatgcgagccgcaagagctctgctacgaagagctagacgcgtggggcgaagagccatgcttagggcggccagacgtgcagcttcgggcgccagcgccggcaggtcccgcaggcaagcagccgctgtcgcagcggcgactattgccgacatggcccaatcgcgaagaggcaatgtatactgggtgcgtgacgctgccaccggtcaacgtgtacccgtgcgcacccgtccccctcgcacttagaagatactgagcagtctccgatgttgtgtcccagcggcgaggatgtccaagcgcaaatacaaggaagaaatgctgcaggttatcgcacctgaagtctacggccaaccgttgaaggatgaaaaaaaaccccgcaaaatcaagcgggttaaaaaggacaaaaaagaagaggaagatggcgatgatgggctggcggagtttgtgcgcgagtttgccccacggcgacgcgtgcaatggcgtgggcgcaaagttcgacatgtgttgagacctggaacttcggtggtctttacacccggcgagcgttcaagcgctacttttaagcgttcctatgatgaggtgtacggggatgatgatattcttgagcaggcggctgaccgattaggcgagtttgcttatggcaagcgtagtagaataacttccaaggatgagacagtgtcgatacccttggatcatggaaatcccacccctagtcttaaaccggtcactttgcagcaagtgttacccgtaactccgcgaacaggtgttaaacgcgaaggtgaagatttgtatcccactatgcaactgatggtacccaaacgccagaagttggaggacgttttggagaaagtaaaagtggatccagatattcaacctgaggttaaagtgagacccattaagcaggtagcgcctggtctgggggtacaaactgtagacattaagattcccactgaaagtatggaagtgcaaactgaacccgcaaagcctactgccacctccactgaagtgcaaacggatccatggatgcccatgcctattacaactgacgccgccggtcccactcgaagatcccgacgaaagtacggtccagcaagtctgttgatgcccaattatgttgtacacccatctattattcctactcctggttaccgaggcactcgctactatcgcagccgaaacagtacctcccgccgtcgccgcaagacacctgcaaatcgcagtcgtcgccgtagacgcacaagcaaaccgactcccggcgccctggtgcggcaagtgtaccgcaatggtagtgcggaacctttgacactgccgcgtgcgcgttaccatccgagtatcatcacttaatcaatgttgccgctgcctccttgcagatatggccctcacttgtcgccttcgcgttcccatcactggttaccgaggaagaaactcgcgccgtagaagagggatgttgggacgcggaatgcgacgctacaggcgacggcgtgctatccgcaagcaattgcggggtggttttttaccagccttaattccaattatcgctgctgcaattggcgcgataccaggcatagcttccgtggcggttcaggcctcgcaacgacattgacattggaaaaaaacgtataaataaaaaaaaaaaaatacaatggactctgacactcctggtcctgtgactatgttttcttagagatggaagacatcaatttttcatccttggctccgcgacacggcacgaagccgtacatgggcacctggagcgacatcggcacgagccaactgaacgggggcgccttcaattggagcagtatctggagcgggcttaaaaattttggctcaaccataaaaacatacgggaacaaagcttggaacagcagtacaggacaggcgcttagaaataaacttaaagaccagaacttccaacaaaaagtagtcgatgggatagcttccggcatcaatggagtggtagatttggctaaccaggctgtgcagaaaaagataaacagtcgtttggacccgccgccagcaaccccaggtgaaatgcaagtggaggaagaaattcctccgccagaaaaacgaggcgacaagcgtccgcgtcccgatttggaagagacgctggtgacgcgcgtagatgaaccgccttcttatgaggaagcaacgaagcttggaatgcccaccactagaccgatagccccaatggccaccggggtgatgaaaccttctcagttgcatcgacccgtcaccttggatttgccccctccccctgctgctactgctgtacccgcttctaagcctgtcgctgccccgaaaccagtcgccgtagccaggtcacgtcccgggggcgctcctcgtccaaatgcgcactggcaaaatactctgaacagcatcgtgggtctaggcgtgcaaagtgtaaaacgccgtcgctgcttttaattaaatatggagtagcgcttaacttgcctatctgtgtatatgtgtcattacacgccgtcacagcagcagaggaaaaaaggaagaggtcgtgcgtcgacgctgagttactttcaagatggccaccccatcgatgctgccccaatgggcatacatgcacatcgccggacaggatgcttcggagtacctgagtccgggtctggtgcagttcgcccgcgccacagacacctacttcaatctgggaaataagtttagaaatcccaccgtagcgccgacccacgatgtgaccaccgaccgtagccagcggctcatgttgcgcttcgtgcccgttgaccgggaggacaatacatactcttacaaagtgcggtacaccctggccgtgggcgacaacagagtgctggatatggccagcacgttctttgacattaggggtgtgttggacagaggtcccagtttcaaaccctattctggtacggcttacaactccctggctcctaaaggcgctccaaatacatctcagtggattgcagaaggtgtaaaaaatacaactggtgaggaacacgtaacagaagaggaaaccaatactactacttacacttttggcaatgctcctgtaaaagctgaagctgaaattacaaaagaaggactcccagtaggtttggaagtttcagatgaagaaagtaaaccgatttatgctgataaaacatatcagccagaacctcagctgggagatgaaacttggactgaccttgatggaaaaaccgaaaagtatggaggcagggctctcaaacccgatactaagatgaaaccatgctacgggtcctttgccaaacctactaatgtgaaaggcggtcaggcaaaacaaaaaacaacggagcagccaaatcagaaagtcgaatatgatatcgacatggagttttttgatgcggcatcgcagaaaacaaacttaagtcctaaaattgtcatgtatgcagaaaatgtaaatttggaaactccagacactcatgtagtgtacaaacctggaacagaagacacaagttccgaagctaatttgggacaacaatctatgcccaacagacccaactacattggcttcagagataactttattggacttatgtactataacagtactggtaacatgggggtgctggctggtcaagcgtctcagttaaatgcagtggttgacttgcaggacagaaacacagaactttcttaccaactcttgcttgactctctgggcgacagaaccagatactttagcatgtggaatcaggctgtggacagttatgatcctgatgtacgtgttattgaaaatcatggtgtggaagatgaacttcccaactactgttttccactggacggcataggtgttccaacaaccagttacaaatcaatagttccaaatggagacaatgcgcctaattggaaggaacctgaagtaaatggaacaagtgagatcggacagggtaatttgtttgccatggaaattaaccttcaagccaatctatggcgaagtttcctttattccaatgtggctctatatctcccagactcgtacaaatacaccccgtccaatgtcactcttccagaaaacaaaaacacctacgactacatgaacgggcgggtggtgccgccatctctagtagacacctatgtgaacattggtgccaggtggtctctggatgccatggacaatgtcaacccattcaaccaccaccgtaacgctggcttgcgttaccgatccatgcttctgggtaacggacgttatgtgcctttccacatacaagtgcctcaaaaattcttcgctgttaaaaacctgctgcttctcccaggctcctacacttatgagtggaactttaggaaggatgtgaacatggttctacagagttccctcggtaacgacctgcgggtagatggcgccagcatcagtttcacgagcatcaacctctatgctacttttttccccatggctcacaacaccgcttccacccttgaagccatgctgcggaatgacaccaatgatcagtcattcaacgactacctatctgcagctaacatgctctaccccattcctgccaatgcaaccaatattcccatttccattccttctcgcaactgggcggctttcagaggctggtcatttaccagactgaaaaccaaagaaactccctctttggggtctggatttgacccctactttgtctattctggttctattccctacctggatggtaccttctacctgaaccacacttttaagaaggtttccatcatgtttgactcttcagtgagctggcctggaaatgacaggttactatctcctaacgaatttgaaataaagcgcactgtggatggcgaaggctacaacgtagcccaatgcaacatgaccaaagactggttcttggtacagatgctcgccaactacaacatcggctatcagggcttctacattccagaaggatacaaagatcgcatgtattcatttttcagaaacttccagcccatgagcaggcaggtggttgatgaggtcaattacaaagacttcaaggccgtcgccataccctaccaacacaacaactctggctttgtgggttacatggctccgaccatgcgccaaggtcaaccctatcccgctaactatccctatccactcattggaacaactgccgtaaatagtgttacgcagaaaaagttcttgtgtgacagaaccatgtggcgcataccgttctcgagcaacttcatgtctatgggggcccttacagacttgggacagaatatgctctatgccaactcagctcatgctctggacatgacctttgaggtggatcccatggatgagcccaccctgctttatcttctcttcgaagttttcgacgtggtcagagtgcatcagccacaccgcggcatcatcgaggcagtctacctgcgtacaccgttctcggccggtaacgctaccacgtaagaagcttcttgcttcttgcaaatagcagctgcaaccatggcctgcggatcccaaaacggctccagcgagcaagagctcagagccattgtccaagacctgggttgcggaccctattttttgggaacctacgataagcgcttcccggggttcatggcccccgataagctcgcctgtgccattgtaaatacggccggacgtgagacggggggagagcactggttggctttcggttggaacccacgttctaacacctgctacctttttgatccttttggattctcggatgatcgtctcaaacagatttaccagtttgaatatgagggtctcctgcgccgcagcgctcttgctaccaaggaccgctgtattacgctggaaaaatctacccagaccgtgcagggtccccgttctgccgcctgcggacttttctgctgcatgttccttcacgcctttgtgcactggcctgaccgtcccatggacggaaaccccaccatgaaattgctaactggagtgccaaacaacatgcttcattctcctaaagtccagcccaccctgtgtgacaatcaaaaagcactctaccattttcttaatacccattcgccttattttcgctcccatcgtacacacatcgaaagggccactgcgttcgaccgtatggatgttcaataatgactcatgtaaacaacgtgttcaataaacatcactttatttttttacatgtatcaaggctctgcattacttatttatttacaagtcgaatgggttctgacgagaatcagaatgacccgcaggcagtgatacgttgcggaactgatacttgggttgccacttgaattcgggaatcaccaacttgggaaccggtatatcgggcaggatgtcactccacagctttctggtcagctgcaaagctccaagcaggtcaggagccgaaatcttgaaatcacaattaggaccagtgctttgagcgcgagagttgcggtacaccggattgcagcactgaaacaccatcagcgacggatgtctcacgcttgccagcacggtgggatctgcaatcatgcccacatccagatcttcagcattggcaatgctgaacggggtcatcttgcaggtctgcctacccatggcgggcacccaattaggcttgtggttgcaatcgcagtgcagggggatcagtatcatcttggcctgatcctgtctgattcctggatacacggctctcatgaaagcatcatattgcttgaaagcctgctgggctttactaccctcggtataaaacatcccgcaggacctgctcgaaaactggttagctgcacagccggcatcattcacacagcagcgggcgtcattgttagctatttgcaccacacttctgccccagcggttttgggtgattttggttcgctcgggattctcctttaaggctcgttgtccgttctcgctggccacatccatctcgataatctgctccttctgaatcataatattgccatgcaggcacttcagcttgccctcataatcattgcagccatgaggccacaacgcacagcctgtacattcccaattatggtgggcgatctgagaaaaagaatgtatcattccctgcagaaatcttcccatcatcgtgctcagtgtcttgtgactagtgaaagttaactggatgcctcggtgctcctcgtttacgtactggtgacagatgcgcttgtattgttcgtgttgctcaggcattagtttaaaagaggttctaagttcgttatccagcctgtacttctccatcagcagacacatcacttccatgcctttctcccaagcagacaccaggggcaagctaatcggattcttaacagtgcaggcagcagctcctttagccagagggtcatctttagcgatcttctcaatgcttcttttgccatccttctcaacgatgcgcacgggcgggtagctgaaacccactgctacaagttgcgcctcttctctttcttcttcgctgtcttgactgatgtcttgcatggggatatgtttggtcttccttggcttctttttggggggtatcggaggaggaggactgtcgctccgttccggagacagggaggattgtgacgtttcgctcaccattaccaactgactgtcggtagaagaacctgaccccacacggcgacaggtgtttctcttcgggggcagaggtggaggcgattgcgaagggctgcggtccgacctggaaggcggatgactggcagaaccccttccgcgttcgggggtgtgctccctgtggcggtcgcttaactgatttccttcgcggctggccattgtgttctcctaggcagagaaacaacagacatggaaactcagccattgctgtcaacatcgccacgagtgccatcacatctcgtcctcagcgacgaggaaaaggagcagagcttaagcattccaccgcccagtcctgccaccacctctaccctagaagataaggaggtcgacgcatctcatgacatgcagaataaaaaagcgaaagagtctgagacagacatcgagcaagacccgggctatgtgacaccggtggaacacgaggaagagttgaaacgctttctagagagagaggatgaaaactgcccaaaacaacgagcagataactatcaccaagatgctggaaatagggatcagaacaccgactacctcatagggcttgacggggaagacgcgctccttaaacatctagcaagacagtcgctcatagtcaaggatgcattattggacagaactgaagtgcccatcagtgtggaagagctcagccgcgcctacgagcttaacctcttttcacctcgtactccccccaaacgtcagccaaacggcacctgcgagccaaatcctcgcttaaacttttatccagcttttgctgtgccagaagtactggctacctatcacatcttttttaaaaatcaaaaaattccagtctcctgccgcgctaatcgcacccgcgccgatgccctactcaatctgggacctggttcacgcttacctgatatagcttccttggaagaggttccaaagatcttcgagggtctgggcaataatgagactcgggccgcaaatgctctgcaaaagggagaaaatggcatggatgagcatcacagcgttctggtggaattggaaggcgataatgccagactcgcagtactcaagcgaagcatcgaggtcacacacttcgcatatcccgctgtcaacctgccccctaaagtcatgacggcggtcatggaccagttactcattaagcgcgcaagtcccctttcagaagacatgcatgacccagatgcctgtgatgagggtaaaccagtggtcagtgatgagcagctaacccgatggctgggcaccgactctcccagggatttggaagagcgtcgcaagcttatgatggccgtggtgctggttaccgtagaactagagtgtctccgacgtttctttaccgattcagaaaccttgcgcaaactcgaagagaatctgcactacacttttagacacggctttgtgcggcaggcatgcaagatatctaacgtggaactcaccaacctggtttcctacatgggtattctgcatgagaatcgcctaggacaaagcgtgctgcacagcaccctgaagggggaagcccgccgtgattacatccgcgattgtgtctatctgtacctgtgccacacgtggcaaaccggcatgggtgtatggcagcaatgtttagaagaacagaacttgaaagagcttgacaagctcttacagaaatctcttaaggttctgtggacagggttcgacgagcgcaccgtcgcttccgacctggcagacctcatcttcccagagcgtctcagggttactttgcgaaacggattgcctgactttatgagccagagcatgcttaacaattttcgctctttcatcctggaacgctccggtatcctgcccgccacctgctgcgcactgccctccgactttgtgcctctcacctaccgcgagtgccccccgccgctatggagtcactgctacctgttccgtctggccaactatctctcctaccactcggatgtgatcgaggatgtgagcggagacggcttgctggagtgtcactgccgctgcaatctgtgcacgccccaccggtccctagcttgcaacccccagttgatgagcgaaacccagataataggcacctttgaattgcaaggccccagcagccaaggcgatgggtcttctcctgggcaaagtttaaaactgaccccgggactgtggacctccgcctacttgcgcaagtttgctccggaagattaccacccctatgaaatcaagttctatgaggaccaatcacagcctccaaaggccgaactttcggcctgcgtcatcacccagggggcaattctggcccaattgcaagccatccaaaaatcccgccaagaatttctactgaaaaagggtaagggggtctaccttgacccccagaccggcgaggaactcaacacaaggttccctcaggatgtcccaacgacgagaaaacaagaagttgaaggtgcagccgccgcccccagaagatatggaggaagattgggacagtcaggcagaggaggcggaggaggacagtctggaggacagtctggaggaagacagtttggaggaggaaaacgaggaggcagaggaggtggaagaagtaaccgccgacaaacagttatcctcggctgcggagacaagcaacagcgctaccatctccgctccgagtcgaggaacccggcggcgtcccagcagtagatgggacgagaccggacgcttcccgaacccaaccagcgcttccaagaccggtaagaaggatcggcagggatacaagtcctggcgggggcataagaatgccatcatctcctgcttgcatgagtgcgggggcaacatatccttcacgcggcgctacttgctattccaccatggggtgaactttccgcgcaatgttttgcattactaccgtcacctccacagcccctactatagccagcaaatcccggcagtctcgacagataaagacagcggcggcgacctccaacagaaaaccagcagcggcagttagaaaatacacaacaagtgcagcaacaggaggattaaagattacagccaacgagccagcgcaaacccgagagttaagaaatcggatctttccaaccctgtatgccatcttccagcagagtcggggtcaagagcaggaactgaaaataaaaaaccgatctctgcgttcgctcaccagaagttgtttgtatcacaagagcgaagatcaacttcagcgcactctcgaggacgccgaggctctcttcaacaagtactgcgcgctgactcttaaagagtaggcagcgaccgcgcttattcaaaaaaggcgggaattacatcatcctcgacatgagtaaagaaattcccacgccttacatgtggagttatcaaccccaaatgggattggcggcaggcgcctcccaggactactccacccgcatgaattggctcagcgccgggccttctatgatttctcgagttaatgatatacgcgcctaccgaaaccaaatacttttggaacagtcagctcttaccaccacgccccgccaacaccttaatcccagaaattggcccgccgccctagtgtaccaggaaagtcccgctcccaccactgtattacttcctcgagacgcccaggccgaagtccaaatgactaatgcaggtgcgcagttagctggcggctccaccctatgtcgtcacaggcctcggcataatataaaacgcctgatgatcagaggccgaggtatccagctcaacgacgagtcggtgagctctccgcttggtctacgaccagacggaatctttcagattgccggctgcgggagatcttccttcacccctcgtcaggctgttctgactttggaaagttcgtcttcgcaaccccgctcgggcggaatcgggaccgttcaatttgtggaggagtttactccctctgtctacttcaaccccttctccggatctcctgggcattacccggacgagttcataccgaacttcgacgcgattagcgagtcagtggacggctacgattgatgtctggtgacgcggctgagctatctcggctgcgacatctagaccactgccgccgctttcgctgctttgcccgggaactcattgagttcatctacttcgaactccccaaggatcaccctcaaggtccggcccacggagtgcggatttctatcgaaggcaaaatagactctcgcctgcaacgaattttctcccagcggcccgtgctgatcgagcgagaccagggaaacaccacggtttccatctactgcatttgtaatcaccccggattgcatgaaagcctttgctgtcttatgtgtactgagtttaataaaaactgaattaagactctcctacggactgccgcttcttcaacccggattttacaaccagaagaacgaaacttttcctgtcgtccaggactctgttaacttcacctttcctactcacaaactagaagctcaacgactacaccgcttttccagaagcattttccctactaatactactttcaaaaccggaggtgagctccaaggtcttcctacagaaaacccttgggtggaagcgggccttgtagtgctaggaattcttgcgggtgggcttgtgattattctttgctacctatacacaccttgcttcactttcttagtggtgttgtggtattggtttaaaaaatggggcccatactagtcttgcttgttttactttcgcttttggaaccgggttctgccaattacgatccatgtctagacttcgacccagaaaactgcacacttacttttgcacccgacacaagccgcatctgtggagttcatcgcctctcttacgaacttggcccccaacgacaaaaatttacctgcatggtgggaatcaaccccatagttatcacccagcaaagtggagatactaagggttgcattcactgctcctgcgattccatcgagtgcacctacaccctgctgaagaccctatgcggcctaagagacctgctaccaatgaattaaaaaatgattaataaaaaatcacttacttgaaatcagcaataaggtctctgttgaaattttctcccagcagcacctcacttccctcttcccaactctggtattctaaaccccgttcagcggcatactttctccatactttaaaggggatgtcaaattttagctcctctcctgtacccacaatcttcatgtctttcttcccagatgaccaagagagtccggctcagtgactccttcaaccctgtctacccctatgaagatgaaagcacctcccaacacccctttataaacccagggtttatttccccaaatggcttcacacaaagcccaaacggagttcttactttaaaatgtttaaccccactaacaaccacaggcggatctctacagctaaaagtgggagggggacttacagtggatgacaccaacggttttttgaaagaaaacataagtgccaccacaccactcgttaagactggtcactctataggtttaccactaggagccggattgggaacgaatgaaaataaactttgtatcaaattaggacaaggacttacattcaattcaaacaacatttgcattgatgacaatattaacaccttatggacaggagtcaaccccaccgaagccaactgtcaaatcatgaactccagtgaatctaatgattgcaaattaattctaacactagttaaaactggagcactagtcactgcatttgtttatgttataggagtatctaacaattttaatatgctaactacacacagaaatataaattttactgcagagctgtttttcgattctactggtaatttactaactagactctcatccctcaaaactccacttaatcataaatcaggacaaaacatggctactggtgccattactaatgctaaaggtttcatgcccagcacgactgcctatcctttcaatgataattctagagaaaaagaaaactacatttacggaacttgttactacacagctagtgatcgcactgcttttcccattgacatatctgtcatgcttaaccgaagagcaataaatgacgagacatcatattgtattcgtataacttggtcctggaacacaggagatgccccagaggtgcaaacctctgctacaaccctagtcacctccccatttaccttttactacatcagagaagacgactgacaaataaagtttgcgatcgctgctaatcctttctctcttcaggccaccatgaaatatacaagttatatcttggcttttcagctctgcatcgttttgggttctcttggctgttactgccaggacccatatgtaaaagaagcagaaaaccttaagaaatattttaatgcaggtcattcagatgtagcggataatggaactcttttcttaggcattttgaagaattggaaagaggagagtgacagaaaaataatgcagagccaaattgtctccttttacttcaaactttttaaaaactttaaagatgaccagagcatccaaaagagtgtggagaccatcaaggaagacatgaatgtcaagtttttcaatagcaacaaaaagaaacgagatgacttcgaaaagctgactaattattcggtaactgacttgaatgtccaacgcaaagcaatacatgaactcatccaagtgatggctgaactgtcgccagcagctaaaacagggaagcgaaaaaggagtcagatgctgtttcgaggtcgaagagcatcccagtaagctagcttgactgactgagatacagcgtaccttcagctcacagacatgataagatacattgatgagtttggacaaaccacaactagaatgcagtgaaaaaaatgctttatttgtgaaatttgtgatgctattgctttatttgtaaccattataagctgcaataaacaagttaacaacaacaattgcattcattttatgtttcaggttcagggggaggtgtgggaggttttttaaagcaagtaaaacctctacaaatgtggtcctgcaggaacttgtttatttgaaaatcaattcacaaaatccgagtagttattttgcctcccccttcccatttaacagaatacaccaatctctccccacgcacagctttaaacatttggataccattagatatagacatggttttagattccacattccaaacagtttcagagcgagccaatctggggtcagtgatagataaaaatccatcgggatagtcttttaaagcgctttcacagtccaactgctgcggatgcgactccggagtctggatcacggtcatctggaagaagaacgatgggaatcataatccgaaaacggtatcggacgattgtgtctcatcaaacccacaagcagccgctgtctgcgtcgctccgtgcgactgctgtttatgggatcagggtccacagtgtcctgaagcatgattttaatagcccttaacatcaactttctggtgcgatgcgcgcagcaacgcattctgatttcactcaaatctttgcagtaggtacaacacattattacaatattgtttaataaaccataattaaaagcgctccagccaaaactcatatctgatataatcgcccctgcatgaccatcataccaaagtttaatataaattaaatgacgttccctcaaaaacacactacccacatacatgatctcttttggcatgtgcatattaacaatctgtctgtaccatggacaacgttggttaatcatgcaacccaatataaccttccggaaccacactgccaacaccgctcccccagccatgcattgaagtgaaccctgctgattacaatgacaatgaagaacccaattctctcgaccgtgaatcacttgagaatgaaaaatatctatagtggcacaacatagacataaatgcatgcatcttctcataatttttaactcctcaggatttagaaacatatcccagggaataggaagctcttgcagaacagtaaagctggcagaacaaggaagaccacgaacacaacttacactatgcatagtcatagtatcacaatctggcaacagcgggtggtcttcagtcatagaagctcgggtttcattttcctcacaacgtggtaactgggctctggtgtaagggtgatgtctggcgcatgatgtcgagcgtgcgcgcaaccttgtcataatggagttgcttcctgacattctcgtattttgtatagcaaaacgcggccctggcagaacacactcttcttcgccttctatcctgccgcttagcgtgttccgtgtgatagttcaagtacaaccacactcttaagttggtcaaaagaatgctggcttcagttgtaatcaaaactccatcgcatctaatcgttctgaggaaatcatccaagcaatgcaactggattgtgtttcaagcaggagaggagagggaagagacggaagaaccatgttaatttttattccaaacgatctcgcagtacttcaaattgtagatcgcgcagatggcatctctcgcccccactgtgttggtgaaaaagcacagctagatcaaaagaaatgcgattttcaaggtgctcaacggtggcttccagcaaagcctccacgcgcacatccaagaacaaaagaataccaaaagaaggagcattttctaactcctcaatcatcatattacattcctgcaccattcccagataattttcagctttccagccttgaattattcgtgtcagttcttgtggtaaatccaatccacacattacaaacaggtcccggagggcgccctccaccaccattcttaaacacaccctcataatgacaaaatatcttgctcctgtgtcacctgtagcgaattgagaatggcaacatcaattgacatgcccttggctctaagttcttctttaagttctagttgtaaaaactctctcatattatcaccaaactgcttagccagaagccccccgggaacaagagcaggggacgctacagtgcagtacaagcgcagacctccccaattggctccagcaaaaacaagattggaataagcatattgggaaccgccagtaatatcatcgaagttgctggaaatataatcaggcagagtttcttgtaaaaattgaataaaagaaaaatttgccaaaaaaacattcaaaacctctgggatgcaaatgcaataggttaccgcgctgcgctccaacattgttagttttgaattagtctgcaaaaataaaaaaaaaaacaagcgtcatatcatagtagcctgacgaacagatggataaatcagtctttccatcacaagacaagccacagggtctccagctcgaccctcgtaaaacctgtcatcatgattaaacaacagcaccgaaagttcctcgcggtgaccagcatgaataattcttgatgaagcatacaatccagacatgttagcatcagttaacgagaaaaaacagccaacatagcctttgggtataattatgcttaatcgtaagtatagcaaagccacccctcgcggatacaaagtaaaaggcacaggagaataaaaaatataattatttctctgctgctgttcaggcaacgtcgcccccggtccctctaaatacacatacaaagcctcatcagccatggcttaccagacaaagtacagcgggcacacaaagcacaagctctaaagtgactctccaacctctccacaatatatatatacacaagccctaaactgacgtaatgggagtaaagtgtaaaaaatcccgccaaacccaacacacaccccgaaactgcgtcaccagggaaaagtacagtttcacttccgcaatcccaacaggcgtaacttcctctttctcacggtacgtgatatcccactaacttgcaacgtcattttcccacggtcgcaccgccccttttagccgttaaccccacagccaatcaccacacgatccacactttttaaaatcacctcatttacatattggcaccattccatctataaggtatattatatagataga

SEQ ID NO: 52 - DNA, 33199 bp, Artificial Sequence
  NG-96 virus genome sequence consisting of a transgene cassette that encodes the cytokine, IFN?, inserted in the region BY.
tctatctatataatataccttatagatggaatggtgccaatatgtaaatgaggtgattttaaaaagtgtggatcgtgtggtgattggctgtggggttaacggctaaaaggggcggtgcgaccgtgggaaaatgacgttttgtgggggtggagtttttttgcaagttgtcgcgggaaatgtgacgcataaaaaggcttttttctcacggaactacttagttttcccacggtatttaacaggaaatgaggtagttttgaccggatgcaagtgaaaattgttgattttcgcgcgaaaactgaatgaggaagtgtttttctgaataatgtggtatttatggcagggtggagtatttgttcagggccaggtagactttgacccattacgtggaggtttcgattaccgtgttttttacctgaatttccgcgtaccgtgtcaaagtcttctgtttttacgtaggtgtcagctgatcgctagggtatttatacctcagggtttgtgtcaagaggccactcttgagtgccagcgagaagagttttctcctctgcgccggcagtttaataataaaaaaatgagagatttgcgatttctgcctcaggaaataatctctgctgagactggaaatgaaatattggagcttgtggtgcacgccctgatgggagacgatccggagccacctgtgcagctttttgagcctcctacgcttcaggaactgtatgatttagaggtagagggatcggaggattctaatgaggaagctgtaaatggcttttttaccgattctatgcttttagctgctaatgaagggttagaattagatccgcctttggacacttttgatactccaggggtaattgtggaaagcggtacaggtgtaagaaaattacctgatttgagttccgtggactgtgatttgcactgctatgaagacgggtttcctccgagtgatgaggaggaccatgaaaaggagcagtccatgcagactgcagcgggtgagggagtgaaggctgccaatgttggttttcagttggattgcccggagcttcctggacatggctgtaagtcttgtgaatttcacaggaaaaatactggagtaaaggaactgttatgttcgctttgttatatgagaacgcactgccactttatttacagtaagtgtgtttaagttaaaatttaaaggaatatgctgtttttcacatgtatattgagtgtgagttttgtgcttcttattataggtcctgtgtctgatgctgatgaatcaccatctcctgattctactacctcacctcctgagattcaagcacctgttcctgtggacgtgcgcaagcccattcctgtgaagcttaagcctgggaaacgtccagcagtggaaaaacttgaggacttgttacagggtggggacggacctttggacttgagtacacggaaacgtccaagacaataagtgttccatatccgtgtttacttaaggtgacgtcaatatttgtgtgacagtgcaatgtaataaaaatatgttaactgttcactggtttttattgctttttgggcggggactcaggtatataagtagaagcagacctgtgtggttagctcataggagctggctttcatccatggaggtttgggccattttggaagaccttaggaagactaggcaactgttagagaacgcttcggacggagtctccggtttttggagattctggttcgctagtgaattagctagggtagtttttaggataaaacaggactataaacaagaatttgaaaagttgttggtagattgcccaggactttttgaagctcttaatttgggccatcaggttcactttaaagaaaaagttttatcagttttagacttttcaaccccaggtagaactgctgctgctgtggcttttcttacttttatattagataaatggatcccgcagactcatttcagcaggggatacgttttggatttcatagccacagcattgtggagaacatggaaggttcgcaagatgaggacaatcttaggttactggccagtgcagcctttgggtgtagcgggaatcctgaggcatccaccggtcatgccagcggttctggaggaggaacagcaagaggacaacccgagagccggcctggaccctccagtggaggaggcggagtagctgacttgtctcctgaactgcaacgggtgcttactggatctacgtccactggacgggataggggcgttaagagggagagggcatctagtggtactgatgctagatctgagttggctttaagtttaatgagtcgcagacgtcctgaaaccatttggtggcatgaggttcagaaagagggaagggatgaagtttctgtattgcaggagaaatattcactggaacaggtgaaaacatgttggttggagcctgaggatgattgggaggtggccattaaaaattatgccaagatagctttgaggcctgataaacagtataagattactagacggattaatatccggaatgcttgttacatatctggaaatggggctgaggtggtaatagatactcaagacaaggcagttattagatgctgcatgatggatatgtggcctggggtagtcggtatggaagcagtaacttttgtaaatgttaagtttaggggagatggttataatggaatagtgtttatggccaataccaaacttatattgcatggttgtagcttttttggtttcaacaatacctgtgtagatgcctggggacaggttagtgtacggggatgtagtttctatgcgtgttggattgccacagctggcagaaccaagagtcaattgtctctgaagaaatgcatatttcaaagatgtaacctgggcattctgaatgaaggcgaagcaagggtccgccactgcgcttctacagatactggatgttttattttgattaagggaaatgccagcgtaaagcataacatgatttgcggtgcttccgatgagaggccttatcaaatgctcacttgtgctggtgggcattgtaatatgctggctactgtgcatattgtttcccatcaacgcaaaaaatggcctgtttttgatcacaatgtgatgacgaagtgtaccatgcatgcaggtgggcgtagaggaatgtttatgccttaccagtgtaacatgaatcatgtgaaagtgttgttggaaccagatgccttttccagaatgagcctaacaggaatttttgacatgaacatgcaaatctggaagatcctgaggtatgatgatacgagatcgagggtacgcgcatgcgaatgcggaggcaagcatgccaggttccagccggtgtgtgtagatgtgactgaagatctcagaccggatcatttggttattgcccgcactggagcagagttcggatccagtggagaagaaactgactaaggtgagtattgggaaaactttggggtgggattttcagatggacagattgagtaaaaatttgttttttctgtcttgcagctgtcatgagtggaaacgcttcttttaaggggggagtcttcagcccttatctgacagggcgtctcccatcctgggcaggagttcgtcagaatgttatgggatctactgtggatggaagacccgtccaacccgccaattcttcaacgctgacctatgctactttaagttcttcacctttggacgcagctgcagctgccgccgccgcttctgttgccgctaacactgtgcttggaatgggttactatggaagcatcatggctaattccacttcctctaataacccttctaccctgactcaggacaagttacttgtccttttggcccagctggaggctttgacccaacgtctgggtgaactttctcagcaggtggtcgagttgcgagtacaaactgagtctgctgtcggcacggcaaagtctaaataaaaaaatcccagaatcaatgaataaataaacaagcttgttgttgatttaaaatcaagtgtttttatttcatttttcgcgcacggtatgccctagaccaccgatctctatcattgagaactcggtggattttttccaggatcctatagaggtgggattgaatgtttagatacatgggcattaggccgtctttggggtggagatagctccattgaagggattcatgctccggggtagtgttgtaaatcacccagtcataacaaggtcgcagtgcatggtgttgcacaatatcttttagaagtaggctgattgccacagataagcccttggtgtaggtgtttacaaaccggttgagctgggatgggtgcattcggggtgaaattatgtgcattttggattggatttttaagttggcaatattgccgccaagatcccgtcttgggttcatgttatgaaggaccaccaagacggtgtatccggtacatttaggaaatttatcgtgcagcttggatggaaaagcgtggaaaaatttggagacacccttgtgtcctccaagattttccatgcactcatccatgataatagcaatggggccgtgggcagcggcgcgggcaaacacgttccgtgggtctgacacatcatagttatgttcctgagttaaatcatcataagccattttaatgaatttggggcggagagtaccagattggggtatgaatgttccttcgggccccggagcatagttcccctcacagatttgcatttcccaagctttcagttccgagggtggaatcatgtccacctggggggctatgaaaaacaccgtttctggggcgggggtgattaattgtgatgatagcaaatttctgagcaattgagatttgccacatccggtggggccataaatgattccgattacgggttgcaggtggtagtttagggaacggcaactgccgtcttctcgaagcaagggggccacctcgttcatcatttcccttacatgcatattttcccgcaccaaatccattaggaggcgctctcctcctagtgatagaagttcttgtagtgaggaaaagtttttcagcggtttcagaccgtcagccatgggcattttggagagagtttgctgcaaaagttctagtctgttccacagttcagtgatgtgttctatggcatctcgatccagcagacctcctcgtttcgcgggtttggacggctcctggaatagggtatgagacgatgggcgtccagcgctgccagggttcggtccttccagggtctcagtgttcgagtcagggttgtttccgtcacagtgaaggggtgtgcgcctgcttgggcgcttgccagggtgcgcttcagactcatcctgctggtcgaaaacttctgtcgcttggcgccctgtatgtcggccaagtagcagtttaccatgagttcgtagttgagcgcctcggctgcgtggcctttggcgcggagcttacctttggaagttttcttgcataccgggcagtataggcatttcagcgcatacaacttgggcgcaaggaaaacggattctggggagtatgcatctgcgccgcaggaggcgcaaacagtttcacattccaccagccaggttaaatccggttcattggggtcaaaaacaagttttccgccatattttttgatgcgtttcttacctttggtctccatgagttcgtgtcctcgttgagtgacaaacaggctgtccgtgtccccgtagactgattttacaggcctcttctccagtggagtgcctcggtcttcttcgtacaggaactctgaccactctgatacaaaggcgcgcgtccaggccagcacaaaggaggctatgtgggaggggtagcgatcgttgtcaaccagggggtccaccttttccaaagtatgcaaacacatgtcaccctcttcaacatccaggaatgtgattggcttgtaggtgtatttcacgtgacctggggtccccgctgggggggtataaaagggggcggttctttgctcttcctcactgtcttccggatcgctgtccaggaacgtcagctgttggggtaggtattccctctcgaaggcgggcatgacctctgcactcaggttgtcagtttctaagaacgaggaggatttgatattgacagtgccggttgagatgcctttcatgaggttttcgtccatctggtcagaaaacacaatttttttattgtcaagtttggtggcaaatgatccatacagggcgttggataaaagtttggcaatggatcgcatggtttggttcttttccttgtccgcgcgctctttggcggcgatgttgagttggacatactcgcgtgccaggcacttccattcggggaagatagttgttaattcatctggcacgattctcacttgccaccctcgattatgcaaggtaattaaatccacactggtggccacctcgcctcgaaggggttcattggtccaacagagcctacctcctttcctagaacagaaagggggaagtgggtctagcataagttcatcgggagggtctgcatccatggtaaagattcccggaagtaaatccttatcaaaatagctgatgggagtggggtcatctaaggccatttgccattctcgagctgccagtgcgcgctcatatgggttaaggggactgccccatggcatgggatgggtgagtgcagaggcatacatgccacagatgtcatagacgtagatgggatcctcaaagatgcctatgtaggttggatagcatcgcccccctctgatacttgctcgcacatagtcatatagttcatgtgatggcgctagcagccccggacccaagttggtgcgattgggtttttctgttctgtagacgatctggcgaaagatggcgtgagaattggaagagatggtgggtctttgaaaaatgttgaaatgggcatgaggtagacctacagagtctctgacaaagtgggcataagattcttgaagcttggttaccagttcggcggtgacaagtacgtctagggcgcagtagtcaagtgtttcttgaatgatgtcataacctggttggtttttcttttcccacagttcgcggttgagaaggtattcttcgcgatccttccagtactcttctagcggaaacccgtctttgtctgcacggtaagatcctagcatgtagaactgattaactgccttgtaagggcagcagcccttctctacgggtagagagtatgcttgagcagcttttcgtagcgaagcgtgagtaagggcaaaggtgtctctgaccatgactttgaggaattggtatttgaagtcgatgtcgtcacaggctccctgttcccagagttggaagtctacccgtttcttgtaggcggggttgggcaaagcgaaagtaacatcattgaagagaatcttgccggccctgggcatgaaattgcgagtgatgcgaaaaggctgtggtacttccgctcggttattgataacctgggcagctaggacgatctcgtcgaaaccgttgatgttgtgtcctacgatgtataattctatgaaacgcggcgtgcctctgacgtgaggtagcttactgagctcatcaaaggttaggtctgtggggtcagataaggcgtagtgttcgagagcccattcgtgcaggtgaggattcgctttaaggaaggaggaccagaggtccactgccagtgctgtttgtaactggtcccggtactgacgaaaatgccgtccgactgccattttttctggggtgacgcaatagaaggtttgggggtcctgccgccagcgatcccacttgagttttatggcgaggtcataggcgatgttgacgagccgctggtctccagagagtttcatgaccagcatgaaggggattagctgcttgccaaaggaccccatccaggtgtaggtttccacatcgtaggtgagaaagagcctttctgtgcgaggatgagagccaatcgggaagaactggatctcctgccaccagttggaggaatggctgttgatgtgatggaagtagaactccctgcgacgcgccgagcattcatgcttgtgcttgtacagacggccgcagtagtcgcagcgttgcacgggttgtatctcgtgaatgagttgtacctggcttcccttgacgagaaatttcagtgggaagccgaggcctggcgattgtatctcgtgctttactatgttgtctgcatcggcctgttcatcttctgtctcgatggtggtcatgctgacgagccctcgcgggaggcaagtccagacctcggcgcggcaggggcggagctcgaggacgagagcgcgcaggctggagctgtccagggtcctgagacgctgcggactcaggttagtaggcagtgtcaggagattaacttgcatgatcttttggagggcgtgcgggaggttcagatagtacttgatctcaacgggtccgttggtggagatgtcgatggcttgcagggttccgtgtcccttgggcgctaccaccgtgcccttgtttttcattttggacggcggtggctctgttgcttcttgcatgtttagaagcggtgtcgagggcgcgcaccgggcggcaggggcggctcgggacccggcggcatggctggcagtggtacgtcggcgccgcgcgcgggtaggttctggtactgcgccctgagaagactcgcatgcgcgacgacgcggcggttgacatcctggatctgacgcctctgggtgaaagctaccggccccgtgagcttgaacctgaaagagagttcaacagaatcaatctcggtatcgttgacggcggcttgcctaaggatttcttgcacgtcaccagagttgtcctggtaggcgatctccgccatgaactgctcgatctcttcctcttgaagatctccgcggcccgctctctcgacggtggccgcgaggtcgttggagatgcgcccaatgagttgagagaatgcattcatgcccgcctcgttccagacgcggctgtagaccacggcccccacgggatctctcgcgcgcatgaccacctgggcgaggttgagctccacgtggcgggtgaagaccgcatagttgcataggcgctggaaaaggtagttgagtgtggtggcgatgtgctcggtgacgaagaaatacatgatccatcgtctcagcggcatctcgctgacatcgcccagagcttccaagcgctccatggcctcgtagaagtccacggcaaaattaaaaaactgggagtttcgcgcggacacggtcaactcctcttccagaagacggataagttcggcgatggtggtgcgcacctcgcgctcgaaagcccctgggatttcttcctcaatctcttcttcttccactaacatctcttcctcttcaggtggggctgcaggaggagggggaacgcggcgacgccggcggcgcacgggcagacggtcgatgaatctttcaatgacctctccgcggcggcggcgcatggtttcagtgacggcgcggccgttctcgcgcggtcgcagagtaaaaacaccgccgcgcatctccttaaagtggtgactgggaggttctccgtttgggagggagagggcgctgattatacattttattaattggcccgtagggactgcacgcagagatctgatcgtgtcaagatccacgggatctgaaaacctttcgacgaaagcgtctaaccagtcacagtcacaaggtaggctgagtacggcttcttgtgggcgggggtggttatgtgttcggtctgggtcttctgtttcttcttcatctcgggaaggtgagacgatgctgctggtgatgaaattaaagtaggcagttctaagacggcggatggtggcgaggagcaccaggtctttgggtccggcttgctggatacgcaggcgattggccattccccaagcattatcctgacatctagcaagatctttgtagtagtcttgcatgagccgttctacgggcacttcttcctcacccgttctgccatgcatacgtgtgagtccaaatccgcgcattggttgtaccagtgccaagtcagctacgactctttcggcgaggatggcttgctgtacttgggtaagggtggcttgaaagtcatcaaaatccacaaagcggtggtaagctcctgtattaatggtgtaagcacagttggccatgactgaccagttaactgtctggtgaccagggcgcacgagctcggtgtatttaaggcgcgaataggcgcgggtgtcaaagatgtaatcgttgcaggtgcgcaccagatactggtaccctataagaaaatgcggcggtggttggcggtagagaggccatcgttctgtagctggagcgccaggggcgaggtcttccaacataaggcggtgatagccgtagatgtacctggacatccaggtgattcctgcggcggtagtagaagcccgaggaaactcgcgtacgcggttccaaatgttgcgtagcggcatgaagtagttcattgtaggcacggtttgaccagtgaggcgcgcgcagtcattgatgctctatagacacggagaaaatgaaagcgttcagcgactcgactccgtagcctggaggaacgtgaacgggttgggtcgcggtgtaccccggttcgagacttgtactcgagccggccggagccgcggctaacgtggtattggcactcccgtctcgacccagcctacaaaaatccaggatacggaatcgagtcgttttgctggtttccgaatggcagggaagtgagtcctattttttttttttgccgctcagatgcatcccgtgctgcgacagatgcgcccccaacaacagcccccctcgcagcagcagcagcagcaatcacaaaaggctgtccctgcaactactgcaactgccgccgtgagcggtgcgggacagcccgcctatgatctggacttggaagagggcgaaggactggcacgtctaggtgcgccttcacccgagcggcatccgcgagttcaactgaaaaaagattctcgcgaggcgtatgtgccccaacagaacctatttagagacagaagcggcgaggagccggaggagatgcgagcttcccgctttaacgcgggtcgtgagctgcgtcacggtttggaccgaagacgagtgttgcgggacgaggatttcgaagttgatgaaatgacagggatcagtcctgccagggcacacgtggctgcagccaaccttgtatcggcttacgagcagacagtaaaggaagagcgtaacttccaaaagtcttttaataatcatgtgcgaaccctgattgcccgcgaagaagttacccttggtttgatgcatttgtgggatttgatggaagctatcattcagaaccctactagcaaacctctgaccgcccagctgtttctggtggtgcaacacagcagagacaatgaggctttcagagaggcgctgctgaacatcaccgaacccgaggggagatggttgtatgatcttatcaacattctacagagtatcatagtgcaggagcggagcctgggcctggccgagaaggtggctgccatcaattactcggttttgagcttgggaaaatattacgctcgcaaaatctacaagactccatacgttcccatagacaaggaggtgaagatagatgggttctacatgcgcatgacgctcaaggtcttgaccctgagcgatgatcttggggtgtatcgcaatgacagaatgcatcgcgcggttagcgccagcaggaggcgcgagttaagcgacagggaactgatgcacagtttgcaaagagctctgactggagctggaaccgagggtgagaattacttcgacatgggagctgacttgcagtggcagcctagtcgcagggctctgagcgccgcgacggcaggatgtgagcttccttacatagaagaggcggatgaaggcgaggaggaagagggcgagtacttggaagactgatggcacaacccgtgttttttgctagatggaacagcaagcaccggatcccgcaatgcgggcggcgctgcagagccagccgtccggcattaactcctcggacgattggacccaggccatgcaacgtatcatggcgttgacgactcgcaaccccgaagcctttagacagcaaccccaggccaaccgtctatcggccatcatggaagctgtagtgccttcccgctctaatcccactcatgagaaggtcctggccatcgtgaacgcgttggtggagaacaaagctattcgtccagatgaggccggactggtatacaacgctctcttagaacgcgtggctcgctacaacagtagcaatgtgcaaaccaatttggaccgtatgataacagatgtacgcgaagccgtgtctcagcgcgaaaggttccagcgtgatgccaacctgggttcgctggtggcgttaaatgctttcttgagtactcagcctgctaatgtgccgcgtggtcaacaggattatactaactttttaagtgctttgagactgatggtatcagaagtacctcagagcgaagtgtatcagtccggtcctgattacttctttcagactagcagacagggcttgcagacggtaaatctgagccaagcttttaaaaacctttaaaggtttgtggggagtgcatgccccggtaggagaaagagcaaccgtgtctagcttgttaactccgaactcccgcctattattactgttggtagctcctttcaccgacagcggtagcatcgaccgtaattcctatttgggttacctactaaacctgtatcgcgaagccatagggcaaagtcaggtggacgagcagacctatcaagaaattacccaagtcagtcgcgctttgggacaggaagacactggcagtttggaagccactctgaacttcttgcttaccaatcggtctcaaaagatccctcctcaatatgctcttactgcggaggaggagaggatccttagatatgtgcagcagagcgtgggattgtttctgatgcaagagggggcaactccgactgcagcactggacatgacagcgcgaaatatggagcccagcatgtatgccagtaaccgacctttcattaacaaactgctggactacttgcacagagctgccgctatgaactctgattatttcaccaatgccatcttaaacccgcactggctgcccccacctggtttctacacgggcgaatatgacatgcccgaccctaatgacggatttctgtgggacgacgtggacagcgatgttttttcacctctttctgatcatcgcacgtggaaaaaggaaggcggcgatagaatgcattcttctgcatcgctgtccggggtcatgggtgctaccgcggctgagcccgagtctgcaagtccttttcctagtctacccttttctctacacagtgtacgtagcagcgaagtgggtagaataagtcgcccgagtttaatgggcgaagaggagtatctaaacgattccttgctcagaccggcaagagaaaaaaatttcccaaacaatggaatagaaagtttggtggataaaatgagtagatggaagacttatgctcaggatcacagagacgagcctgggatcatggggattacaagtagagcgagccgtagacgccagcgccatgacagacagaggggtcttgtgtgggacgatgaggattcggccgatgatagcagcgtgctggacttgggtgggagaggaaggggcaacccgtttgctcatttgcgccctcgcttgggtggtatgttgtaaaaaaaaataaaaaaaaaactcaccaaggccatggcgacgagcgtacgttcgttcttctttattatctgtgtctagtataatgaggcgagtcgtgctaggcggagcggtggtgtatccggagggtcctcctccttcgtacgagagcgtgatgcagcagcagcaggcgacggcggtgatgcaatccccactggaggctccctttgtgcctccgcgatacctggcacctacggagggcagaaacagcattcgttattcggaactggcacctcagtacgataccaccaggttgtatctggtggacaacaagtcggcggacattgcttctctgaactatcagaatgaccacagcaacttcttgaccacggtggtgcaaaacaatgactttacccctacggaagccagcacccagaccattaactttgatgaacgatcgcggtggggcggtcagctaaagaccatcatgcatactaacatgccaaacgtgaacgagtatatgtttagtaacaagttcaaagcgcgtgtgatggtgtccagaaaacctcccgacggtgctgcagttggggatacttatgatcacaagcaggatattttgaaatatgagtggttcgagtttactttgccagaaggcaacttttcagttactatgactattgatttgatgaacaatgccatcatagataattacttgaaagtgggtagacagaatggagtgcttgaaagtgacattggtgttaagttcgacaccaggaacttcaagctgggatgggatcccgaaaccaagttgatcatgcctggagtgtatacgtatgaagccttccatcctgacattgtcttactgcctggctgcggagtggattttaccgagagtcgtttgagcaaccttcttggtatcagaaaaaaacagccatttcaagagggttttaagattttgtatgaagatttagaaggtggtaatattccggccctcttggatgtagatgcctatgagaacagtaagaaagaacaaaaagccaaaatagaagctgctacagctgctgcagaagctaaggcaaacatagttgccagcgactctacaagggttgctaacgctggagaggtcagaggagacaattttgcgccaacacctgttccgactgcagaatcattattggccgatgtgtctgaaggaacggacgtgaaactcactattcaacctgtagaaaaagatagtaagaatagaagctataatgtgttggaagacaaaatcaacacagcctatcgcagttggtatctttcgtacaattatggcgatcccgaaaaaggagtgcgttcctggacattgctcaccacctcagatgtcacctgcggagcagagcaggtctactggtcgcttccagacatgatgaaggatcctgtcactttccgctccactagacaagtcagtaactaccctgtggtgggtgcagagcttatgcccgtcttctcaaagagcttctacaacgaacaagctgtgtactcccagcagctccgccagtccacctcgcttacgcacgtcttcaaccgctttcctgagaaccagattttaatccgtccgccggcgcccaccattaccaccgtcagtgaaaacgttcctgctctcacagatcacgggaccctgccgttgcgcagcagtatccggggagtccaacgtgtgaccgttactgacgccagacgccgcacctgtccctacgtgtacaaggcactgggcatagtcgcaccgcgcgtcctttcaagccgcactttctaaaaaaaaaaaaaatgtccattcttatctcgcccagtaataacaccggttggggtctgcgcgctccaagcaagatgtacggaggcgcacgcaaacgttctacccaacatcctgtccgtgttcgcggacattttcgcgctccatggggcgccctcaagggccgcactcgcgttcgaaccaccgtcgatgatgtaatcgatcaggtggttgccgacgcccgtaattatactcctactgcgcctacatctactgtggatgcagttattgacagtgtagtggctgacgctcgcaactatgctcgacgtaagagccggcgaaggcgcattgccagacgccaccgagctaccactgccatgcgagccgcaagagctctgctacgaagagctagacgcgtggggcgaagagccatgcttagggcggccagacgtgcagcttcgggcgccagcgccggcaggtcccgcaggcaagcagccgctgtcgcagcggcgactattgccgacatggcccaatcgcgaagaggcaatgtatactgggtgcgtgacgctgccaccggtcaacgtgtacccgtgcgcacccgtccccctcgcacttagaagatactgagcagtctccgatgttgtgtcccagcggcgaggatgtccaagcgcaaatacaaggaagaaatgctgcaggttatcgcacctgaagtctacggccaaccgttgaaggatgaaaaaaaaccccgcaaaatcaagcgggttaaaaaggacaaaaaagaagaggaagatggcgatgatgggctggcggagtttgtgcgcgagtttgccccacggcgacgcgtgcaatggcgtgggcgcaaagttcgacatgtgttgagacctggaacttcggtggtctttacacccggcgagcgttcaagcgctacttttaagcgttcctatgatgaggtgtacggggatgatgatattcttgagcaggcggctgaccgattaggcgagtttgcttatggcaagcgtagtagaataacttccaaggatgagacagtgtcgatacccttggatcatggaaatcccacccctagtcttaaaccggtcactttgcagcaagtgttacccgtaactccgcgaacaggtgttaaacgcgaaggtgaagatttgtatcccactatgcaactgatggtacccaaacgccagaagttggaggacgttttggagaaagtaaaagtggatccagatattcaacctgaggttaaagtgagacccattaagcaggtagcgcctggtctgggggtacaaactgtagacattaagattcccactgaaagtatggaagtgcaaactgaacccgcaaagcctactgccacctccactgaagtgcaaacggatccatggatgcccatgcctattacaactgacgccgccggtcccactcgaagatcccgacgaaagtacggtccagcaagtctgttgatgcccaattatgttgtacacccatctattattcctactcctggttaccgaggcactcgctactatcgcagccgaaacagtacctcccgccgtcgccgcaagacacctgcaaatcgcagtcgtcgccgtagacgcacaagcaaaccgactcccggcgccctggtgcggcaagtgtaccgcaatggtagtgcggaacctttgacactgccgcgtgcgcgttaccatccgagtatcatcacttaatcaatgttgccgctgcctccttgcagatatggccctcacttgtcgccttcgcgttcccatcactggttaccgaggaagaaactcgcgccgtagaagagggatgttgggacgcggaatgcgacgctacaggcgacggcgtgctatccgcaagcaattgcggggtggttttttaccagccttaattccaattatcgctgctgcaattggcgcgataccaggcatagcttccgtggcggttcaggcctcgcaacgacattgacattggaaaaaaacgtataaataaaaaaaaaaaaatacaatggactctgacactcctggtcctgtgactatgttttcttagagatggaagacatcaatttttcatccttggctccgcgacacggcacgaagccgtacatgggcacctggagcgacatcggcacgagccaactgaacgggggcgccttcaattggagcagtatctggagcgggcttaaaaattttggctcaaccataaaaacatacgggaacaaagcttggaacagcagtacaggacaggcgcttagaaataaacttaaagaccagaacttccaacaaaaagtagtcgatgggatagcttccggcatcaatggagtggtagatttggctaaccaggctgtgcagaaaaagataaacagtcgtttggacccgccgccagcaaccccaggtgaaatgcaagtggaggaagaaattcctccgccagaaaaacgaggcgacaagcgtccgcgtcccgatttggaagagacgctggtgacgcgcgtagatgaaccgccttcttatgaggaagcaacgaagcttggaatgcccaccactagaccgatagccccaatggccaccggggtgatgaaaccttctcagttgcatcgacccgtcaccttggatttgccccctccccctgctgctactgctgtacccgcttctaagcctgtcgctgccccgaaaccagtcgccgtagccaggtcacgtcccgggggcgctcctcgtccaaatgcgcactggcaaaatactctgaacagcatcgtgggtctaggcgtgcaaagtgtaaaacgccgtcgctgcttttaattaaatatggagtagcgcttaacttgcctatctgtgtatatgtgtcattacacgccgtcacagcagcagaggaaaaaaggaagaggtcgtgcgtcgacgctgagttactttcaagatggccaccccatcgatgctgccccaatgggcatacatgcacatcgccggacaggatgcttcggagtacctgagtccgggtctggtgcagttcgcccgcgccacagacacctacttcaatctgggaaataagtttagaaatcccaccgtagcgccgacccacgatgtgaccaccgaccgtagccagcggctcatgttgcgcttcgtgcccgttgaccgggaggacaatacatactcttacaaagtgcggtacaccctggccgtgggcgacaacagagtgctggatatggccagcacgttctttgacattaggggtgtgttggacagaggtcccagtttcaaaccctattctggtacggcttacaactccctggctcctaaaggcgctccaaatacatctcagtggattgcagaaggtgtaaaaaatacaactggtgaggaacacgtaacagaagaggaaaccaatactactacttacacttttggcaatgctcctgtaaaagctgaagctgaaattacaaaagaaggactcccagtaggtttggaagtttcagatgaagaaagtaaaccgatttatgctgataaaacatatcagccagaacctcagctgggagatgaaacttggactgaccttgatggaaaaaccgaaaagtatggaggcagggctctcaaacccgatactaagatgaaaccatgctacgggtcctttgccaaacctactaatgtgaaaggcggtcaggcaaaacaaaaaacaacggagcagccaaatcagaaagtcgaatatgatatcgacatggagttttttgatgcggcatcgcagaaaacaaacttaagtcctaaaattgtcatgtatgcagaaaatgtaaatttggaaactccagacactcatgtagtgtacaaacctggaacagaagacacaagttccgaagctaatttgggacaacaatctatgcccaacagacccaactacattggcttcagagataactttattggacttatgtactataacagtactggtaacatgggggtgctggctggtcaagcgtctcagttaaatgcagtggttgacttgcaggacagaaacacagaactttcttaccaactcttgcttgactctctgggcgacagaaccagatactttagcatgtggaatcaggctgtggacagttatgatcctgatgtacgtgttattgaaaatcatggtgtggaagatgaacttcccaactactgttttccactggacggcataggtgttccaacaaccagttacaaatcaatagttccaaatggagacaatgcgcctaattggaaggaacctgaagtaaatggaacaagtgagatcggacagggtaatttgtttgccatggaaattaaccttcaagccaatctatggcgaagtttcctttattccaatgtggctctatatctcccagactcgtacaaatacaccccgtccaatgtcactcttccagaaaacaaaaacacctacgactacatgaacgggcgggtggtgccgccatctctagtagacacctatgtgaacattggtgccaggtggtctctggatgccatggacaatgtcaacccattcaaccaccaccgtaacgctggcttgcgttaccgatccatgcttctgggtaacggacgttatgtgcctttccacatacaagtgcctcaaaaattcttcgctgttaaaaacctgctgcttctcccaggctcctacacttatgagtggaactttaggaaggatgtgaacatggttctacagagttccctcggtaacgacctgcgggtagatggcgccagcatcagtttcacgagcatcaacctctatgctacttttttccccatggctcacaacaccgcttccacccttgaagccatgctgcggaatgacaccaatgatcagtcattcaacgactacctatctgcagctaacatgctctaccccattcctgccaatgcaaccaatattcccatttccattccttctcgcaactgggcggctttcagaggctggtcatttaccagactgaaaaccaaagaaactccctctttggggtctggatttgacccctactttgtctattctggttctattccctacctggatggtaccttctacctgaaccacacttttaagaaggtttccatcatgtttgactcttcagtgagctggcctggaaatgacaggttactatctcctaacgaatttgaaataaagcgcactgtggatggcgaaggctacaacgtagcccaatgcaacatgaccaaagactggttcttggtacagatgctcgccaactacaacatcggctatcagggcttctacattccagaaggatacaaagatcgcatgtattcatttttcagaaacttccagcccatgagcaggcaggtggttgatgaggtcaattacaaagacttcaaggccgtcgccataccctaccaacacaacaactctggctttgtgggttacatggctccgaccatgcgccaaggtcaaccctatcccgctaactatccctatccactcattggaacaactgccgtaaatagtgttacgcagaaaaagttcttgtgtgacagaaccatgtggcgcataccgttctcgagcaacttcatgtctatgggggcccttacagacttgggacagaatatgctctatgccaactcagctcatgctctggacatgacctttgaggtggatcccatggatgagcccaccctgctttatcttctcttcgaagttttcgacgtggtcagagtgcatcagccacaccgcggcatcatcgaggcagtctacctgcgtacaccgttctcggccggtaacgctaccacgtaagaagcttcttgcttcttgcaaatagcagctgcaaccatggcctgcggatcccaaaacggctccagcgagcaagagctcagagccattgtccaagacctgggttgcggaccctattttttgggaacctacgataagcgcttcccggggttcatggcccccgataagctcgcctgtgccattgtaaatacggccggacgtgagacggggggagagcactggttggctttcggttggaacccacgttctaacacctgctacctttttgatccttttggattctcggatgatcgtctcaaacagatttaccagtttgaatatgagggtctcctgcgccgcagcgctcttgctaccaaggaccgctgtattacgctggaaaaatctacccagaccgtgcagggtccccgttctgccgcctgcggacttttctgctgcatgttccttcacgcctttgtgcactggcctgaccgtcccatggacggaaaccccaccatgaaattgctaactggagtgccaaacaacatgcttcattctcctaaagtccagcccaccctgtgtgacaatcaaaaagcactctaccattttcttaatacccattcgccttattttcgctcccatcgtacacacatcgaaagggccactgcgttcgaccgtatggatgttcaataatgactcatgtaaacaacgtgttcaataaacatcactttatttttttacatgtatcaaggctctgcattacttatttatttacaagtcgaatgggttctgacgagaatcagaatgacccgcaggcagtgatacgttgcggaactgatacttgggttgccacttgaattcgggaatcaccaacttgggaaccggtatatcgggcaggatgtcactccacagctttctggtcagctgcaaagctccaagcaggtcaggagccgaaatcttgaaatcacaattaggaccagtgctttgagcgcgagagttgcggtacaccggattgcagcactgaaacaccatcagcgacggatgtctcacgcttgccagcacggtgggatctgcaatcatgcccacatccagatcttcagcattggcaatgctgaacggggtcatcttgcaggtctgcctacccatggcgggcacccaattaggcttgtggttgcaatcgcagtgcagggggatcagtatcatcttggcctgatcctgtctgattcctggatacacggctctcatgaaagcatcatattgcttgaaagcctgctgggctttactaccctcggtataaaacatcccgcaggacctgctcgaaaactggttagctgcacagccggcatcattcacacagcagcgggcgtcattgttagctatttgcaccacacttctgccccagcggttttgggtgattttggttcgctcgggattctcctttaaggctcgttgtccgttctcgctggccacatccatctcgataatctgctccttctgaatcataatattgccatgcaggcacttcagcttgccctcataatcattgcagccatgaggccacaacgcacagcctgtacattcccaattatggtgggcgatctgagaaaaagaatgtatcattccctgcagaaatcttcccatcatcgtgctcagtgtcttgtgactagtgaaagttaactggatgcctcggtgctcctcgtttacgtactggtgacagatgcgcttgtattgttcgtgttgctcaggcattagtttaaaagaggttctaagttcgttatccagcctgtacttctccatcagcagacacatcacttccatgcctttctcccaagcagacaccaggggcaagctaatcggattcttaacagtgcaggcagcagctcctttagccagagggtcatctttagcgatcttctcaatgcttcttttgccatccttctcaacgatgcgcacgggcgggtagctgaaacccactgctacaagttgcgcctcttctctttcttcttcgctgtcttgactgatgtcttgcatggggatatgtttggtcttccttggcttctttttggggggtatcggaggaggaggactgtcgctccgttccggagacagggaggattgtgacgtttcgctcaccattaccaactgactgtcggtagaagaacctgaccccacacggcgacaggtgtttctcttcgggggcagaggtggaggcgattgcgaagggctgcggtccgacctggaaggcggatgactggcagaaccccttccgcgttcgggggtgtgctccctgtggcggtcgcttaactgatttccttcgcggctggccattgtgttctcctaggcagagaaacaacagacatggaaactcagccattgctgtcaacatcgccacgagtgccatcacatctcgtcctcagcgacgaggaaaaggagcagagcttaagcattccaccgcccagtcctgccaccacctctaccctagaagataaggaggtcgacgcatctcatgacatgcagaataaaaaagcgaaagagtctgagacagacatcgagcaagacccgggctatgtgacaccggtggaacacgaggaagagttgaaacgctttctagagagagaggatgaaaactgcccaaaacaacgagcagataactatcaccaagatgctggaaatagggatcagaacaccgactacctcatagggcttgacggggaagacgcgctccttaaacatctagcaagacagtcgctcatagtcaaggatgcattattggacagaactgaagtgcccatcagtgtggaagagctcagccgcgcctacgagcttaacctcttttcacctcgtactccccccaaacgtcagccaaacggcacctgcgagccaaatcctcgcttaaacttttatccagcttttgctgtgccagaagtactggctacctatcacatcttttttaaaaatcaaaaaattccagtctcctgccgcgctaatcgcacccgcgccgatgccctactcaatctgggacctggttcacgcttacctgatatagcttccttggaagaggttccaaagatcttcgagggtctgggcaataatgagactcgggccgcaaatgctctgcaaaagggagaaaatggcatggatgagcatcacagcgttctggtggaattggaaggcgataatgccagactcgcagtactcaagcgaagcatcgaggtcacacacttcgcatatcccgctgtcaacctgccccctaaagtcatgacggcggtcatggaccagttactcattaagcgcgcaagtcccctttcagaagacatgcatgacccagatgcctgtgatgagggtaaaccagtggtcagtgatgagcagctaacccgatggctgggcaccgactctcccagggatttggaagagcgtcgcaagcttatgatggccgtggtgctggttaccgtagaactagagtgtctccgacgtttctttaccgattcagaaaccttgcgcaaactcgaagagaatctgcactacacttttagacacggctttgtgcggcaggcatgcaagatatctaacgtggaactcaccaacctggtttcctacatgggtattctgcatgagaatcgcctaggacaaagcgtgctgcacagcaccctgaagggggaagcccgccgtgattacatccgcgattgtgtctatctgtacctgtgccacacgtggcaaaccggcatgggtgtatggcagcaatgtttagaagaacagaacttgaaagagcttgacaagctcttacagaaatctcttaaggttctgtggacagggttcgacgagcgcaccgtcgcttccgacctggcagacctcatcttcccagagcgtctcagggttactttgcgaaacggattgcctgactttatgagccagagcatgcttaacaattttcgctctttcatcctggaacgctccggtatcctgcccgccacctgctgcgcactgccctccgactttgtgcctctcacctaccgcgagtgccccccgccgctatggagtcactgctacctgttccgtctggccaactatctctcctaccactcggatgtgatcgaggatgtgagcggagacggcttgctggagtgtcactgccgctgcaatctgtgcacgccccaccggtccctagcttgcaacccccagttgatgagcgaaacccagataataggcacctttgaattgcaaggccccagcagccaaggcgatgggtcttctcctgggcaaagtttaaaactgaccccgggactgtggacctccgcctacttgcgcaagtttgctccggaagattaccacccctatgaaatcaagttctatgaggaccaatcacagcctccaaaggccgaactttcggcctgcgtcatcacccagggggcaattctggcccaattgcaagccatccaaaaatcccgccaagaatttctactgaaaaagggtaagggggtctaccttgacccccagaccggcgaggaactcaacacaaggttccctcaggatgtcccaacgacgagaaaacaagaagttgaaggtgcagccgccgcccccagaagatatggaggaagattgggacagtcaggcagaggaggcggaggaggacagtctggaggacagtctggaggaagacagtttggaggaggaaaacgaggaggcagaggaggtggaagaagtaaccgccgacaaacagttatcctcggctgcggagacaagcaacagcgctaccatctccgctccgagtcgaggaacccggcggcgtcccagcagtagatgggacgagaccggacgcttcccgaacccaaccagcgcttccaagaccggtaagaaggatcggcagggatacaagtcctggcgggggcataagaatgccatcatctcctgcttgcatgagtgcgggggcaacatatccttcacgcggcgctacttgctattccaccatggggtgaactttccgcgcaatgttttgcattactaccgtcacctccacagcccctactatagccagcaaatcccggcagtctcgacagataaagacagcggcggcgacctccaacagaaaaccagcagcggcagttagaaaatacacaacaagtgcagcaacaggaggattaaagattacagccaacgagccagcgcaaacccgagagttaagaaatcggatctttccaaccctgtatgccatcttccagcagagtcggggtcaagagcaggaactgaaaataaaaaaccgatctctgcgttcgctcaccagaagttgtttgtatcacaagagcgaagatcaacttcagcgcactctcgaggacgccgaggctctcttcaacaagtactgcgcgctgactcttaaagagtaggcagcgaccgcgcttattcaaaaaaggcgggaattacatcatcctcgacatgagtaaagaaattcccacgccttacatgtggagttatcaaccccaaatgggattggcggcaggcgcctcccaggactactccacccgcatgaattggctcagcgccgggccttctatgatttctcgagttaatgatatacgcgcctaccgaaaccaaatacttttggaacagtcagctcttaccaccacgccccgccaacaccttaatcccagaaattggcccgccgccctagtgtaccaggaaagtcccgctcccaccactgtattacttcctcgagacgcccaggccgaagtccaaatgactaatgcaggtgcgcagttagctggcggctccaccctatgtcgtcacaggcctcggcataatataaaacgcctgatgatcagaggccgaggtatccagctcaacgacgagtcggtgagctctccgcttggtctacgaccagacggaatctttcagattgccggctgcgggagatcttccttcacccctcgtcaggctgttctgactttggaaagttcgtcttcgcaaccccgctcgggcggaatcgggaccgttcaatttgtggaggagtttactccctctgtctacttcaaccccttctccggatctcctgggcattacccggacgagttcataccgaacttcgacgcgattagcgagtcagtggacggctacgattgatgtctggtgacgcggctgagctatctcggctgcgacatctagaccactgccgccgctttcgctgctttgcccgggaactcattgagttcatctacttcgaactccccaaggatcaccctcaaggtccggcccacggagtgcggatttctatcgaaggcaaaatagactctcgcctgcaacgaattttctcccagcggcccgtgctgatcgagcgagaccagggaaacaccacggtttccatctactgcatttgtaatcaccccggattgcatgaaagcctttgctgtcttatgtgtactgagtttaataaaaactgaattaagactctcctacggactgccgcttcttcaacccggattttacaaccagaagaacgaaacttttcctgtcgtccaggactctgttaacttcacctttcctactcacaaactagaagctcaacgactacaccgcttttccagaagcattttccctactaatactactttcaaaaccggaggtgagctccaaggtcttcctacagaaaacccttgggtggaagcgggccttgtagtgctaggaattcttgcgggtgggcttgtgattattctttgctacctatacacaccttgcttcactttcttagtggtgttgtggtattggtttaaaaaatggggcccatactagtcttgcttgttttactttcgcttttggaaccgggttctgccaattacgatccatgtctagacttcgacccagaaaactgcacacttacttttgcacccgacacaagccgcatctgtggagttcatcgcctctcttacgaacttggcccccaacgacaaaaatttacctgcatggtgggaatcaaccccatagttatcacccagcaaagtggagatactaagggttgcattcactgctcctgcgattccatcgagtgcacctacaccctgctgaagaccctatgcggcctaagagacctgctaccaatgaattaaaaaatgattaataaaaaatcacttacttgaaatcagcaataaggtctctgttgaaattttctcccagcagcacctcacttccctcttcccaactctggtattctaaaccccgttcagcggcatactttctccatactttaaaggggatgtcaaattttagctcctctcctgtacccacaatcttcatgtctttcttcccagatgaccaagagagtccggctcagtgactccttcaaccctgtctacccctatgaagatgaaagcacctcccaacacccctttataaacccagggtttatttccccaaatggcttcacacaaagcccaaacggagttcttactttaaaatgtttaaccccactaacaaccacaggcggatctctacagctaaaagtgggagggggacttacagtggatgacaccaacggttttttgaaagaaaacataagtgccaccacaccactcgttaagactggtcactctataggtttaccactaggagccggattgggaacgaatgaaaataaactttgtatcaaattaggacaaggacttacattcaattcaaacaacatttgcattgatgacaatattaacaccttatggacaggagtcaaccccaccgaagccaactgtcaaatcatgaactccagtgaatctaatgattgcaaattaattctaacactagttaaaactggagcactagtcactgcatttgtttatgttataggagtatctaacaattttaatatgctaactacacacagaaatataaattttactgcagagctgtttttcgattctactggtaatttactaactagactctcatccctcaaaactccacttaatcataaatcaggacaaaacatggctactggtgccattactaatgctaaaggtttcatgcccagcacgactgcctatcctttcaatgataattctagagaaaaagaaaactacatttacggaacttgttactacacagctagtgatcgcactgcttttcccattgacatatctgtcatgcttaaccgaagagcaataaatgacgagacatcatattgtattcgtataacttggtcctggaacacaggagatgccccagaggtgcaaacctctgctacaaccctagtcacctccccatttaccttttactacatcagagaagacgactgacaaataaagtttgcgatcgctgctaatcctttctctcttcaggccaccatggccttgacctttgctttactggtggccctcctggtgctcagctgcaagtcaagctgctctgtgggctgtgatctgcctcaaacccacagcctgggtagcaggaggaccttgatgctcctggcacagatgaggagaatctctcttttctcctgcttgaaggacagacatgactttggatttccccaggaggagtttggcaaccagttccaaaaggctgaaaccatccctgtcctccatgagatgatccagcagatcttcaatctcttcagcacaaaggactcatctgctgcttgggatgagaccctcctagacaaattctacactgaactctaccagcagctgaatgacctggaagcctgtgtgatacagggggtgggggtgacagagactcccctgatgaaggaggactccattctggctgtgaggaaatacttccaaagaatcactctctatctgaaagagaagaaatacagcccttgtgcctgggaggttgtcagagcagaaatcatgagatctttttctttgtcaacaaacttgcaagaaagtttaagaagtaaggaatgagctagcttgactgactgagatacagcgtaccttcagctcacagacatgataagatacattgatgagtttggacaaaccacaactagaatgcagtgaaaaaaatgctttatttgtgaaatttgtgatgctattgctttatttgtaaccattataagctgcaataaacaagttaacaacaacaattgcattcattttatgtttcaggttcagggggaggtgtgggaggttttttaaagcaagtaaaacctctacaaatgtggtcctgcaggaacttgtttatttgaaaatcaattcacaaaatccgagtagttattttgcctcccccttcccatttaacagaatacaccaatctctccccacgcacagctttaaacatttggataccattagatatagacatggttttagattccacattccaaacagtttcagagcgagccaatctggggtcagtgatagataaaaatccatcgggatagtcttttaaagcgctttcacagtccaactgctgcggatgcgactccggagtctggatcacggtcatctggaagaagaacgatgggaatcataatccgaaaacggtatcggacgattgtgtctcatcaaacccacaagcagccgctgtctgcgtcgctccgtgcgactgctgtttatgggatcagggtccacagtgtcctgaagcatgattttaatagcccttaacatcaactttctggtgcgatgcgcgcagcaacgcattctgatttcactcaaatctttgcagtaggtacaacacattattacaatattgtttaataaaccataattaaaagcgctccagccaaaactcatatctgatataatcgcccctgcatgaccatcataccaaagtttaatataaattaaatgacgttccctcaaaaacacactacccacatacatgatctcttttggcatgtgcatattaacaatctgtctgtaccatggacaacgttggttaatcatgcaacccaatataaccttccggaaccacactgccaacaccgctcccccagccatgcattgaagtgaaccctgctgattacaatgacaatgaagaacccaattctctcgaccgtgaatcacttgagaatgaaaaatatctatagtggcacaacatagacataaatgcatgcatcttctcataatttttaactcctcaggatttagaaacatatcccagggaataggaagctcttgcagaacagtaaagctggcagaacaaggaagaccacgaacacaacttacactatgcatagtcatagtatcacaatctggcaacagcgggtggtcttcagtcatagaagctcgggtttcattttcctcacaacgtggtaactgggctctggtgtaagggtgatgtctggcgcatgatgtcgagcgtgcgcgcaaccttgtcataatggagttgcttcctgacattctcgtattttgtatagcaaaacgcggccctggcagaacacactcttcttcgccttctatcctgccgcttagcgtgttccgtgtgatagttcaagtacaaccacactcttaagttggtcaaaagaatgctggcttcagttgtaatcaaaactccatcgcatctaatcgttctgaggaaatcatccaagcaatgcaactggattgtgtttcaagcaggagaggagagggaagagacggaagaaccatgttaatttttattccaaacgatctcgcagtacttcaaattgtagatcgcgcagatggcatctctcgcccccactgtgttggtgaaaaagcacagctagatcaaaagaaatgcgattttcaaggtgctcaacggtggcttccagcaaagcctccacgcgcacatccaagaacaaaagaataccaaaagaaggagcattttctaactcctcaatcatcatattacattcctgcaccattcccagataattttcagctttccagccttgaattattcgtgtcagttcttgtggtaaatccaatccacacattacaaacaggtcccggagggcgccctccaccaccattcttaaacacaccctcataatgacaaaatatcttgctcctgtgtcacctgtagcgaattgagaatggcaacatcaattgacatgcccttggctctaagttcttctttaagttctagttgtaaaaactctctcatattatcaccaaactgcttagccagaagccccccgggaacaagagcaggggacgctacagtgcagtacaagcgcagacctccccaattggctccagcaaaaacaagattggaataagcatattgggaaccgccagtaatatcatcgaagttgctggaaatataatcaggcagagtttcttgtaaaaattgaataaaagaaaaatttgccaaaaaaacattcaaaacctctgggatgcaaatgcaataggttaccgcgctgcgctccaacattgttagttttgaattagtctgcaaaaataaaaaaaaaaacaagcgtcatatcatagtagcctgacgaacagatggataaatcagtctttccatcacaagacaagccacagggtctccagctcgaccctcgtaaaacctgtcatcatgattaaacaacagcaccgaaagttcctcgcggtgaccagcatgaataattcttgatgaagcatacaatccagacatgttagcatcagttaacgagaaaaaacagccaacatagcctttgggtataattatgcttaatcgtaagtatagcaaagccacccctcgcggatacaaagtaaaaggcacaggagaataaaaaatataattatttctctgctgctgttcaggcaacgtcgcccccggtccctctaaatacacatacaaagcctcatcagccatggcttaccagacaaagtacagcgggcacacaaagcacaagctctaaagtgactctccaacctctccacaatatatatatacacaagccctaaactgacgtaatgggagtaaagtgtaaaaaatcccgccaaacccaacacacaccccgaaactgcgtcaccagggaaaagtacagtttcacttccgcaatcccaacaggcgtaacttcctctttctcacggtacgtgatatcccactaacttgcaacgtcattttcccacggtcgcaccgccccttttagccgttaaccccacagccaatcaccacacgatccacactttttaaaatcacctcatttacatattggcaccattccatctataaggtatattatatagataga

SEQ ID NO: 53 - DNA, 33314 bp, Artificial Sequence
  NG-139 virus genome sequence consisting of a transgene cassette that encodes the cytokine, TNF?, inserted in the region BY.
tctatctatataatataccttatagatggaatggtgccaatatgtaaatgaggtgattttaaaaagtgtggatcgtgtggtgattggctgtggggttaacggctaaaaggggcggtgcgaccgtgggaaaatgacgttttgtgggggtggagtttttttgcaagttgtcgcgggaaatgtgacgcataaaaaggcttttttctcacggaactacttagttttcccacggtatttaacaggaaatgaggtagttttgaccggatgcaagtgaaaattgttgattttcgcgcgaaaactgaatgaggaagtgtttttctgaataatgtggtatttatggcagggtggagtatttgttcagggccaggtagactttgacccattacgtggaggtttcgattaccgtgttttttacctgaatttccgcgtaccgtgtcaaagtcttctgtttttacgtaggtgtcagctgatcgctagggtatttatacctcagggtttgtgtcaagaggccactcttgagtgccagcgagaagagttttctcctctgcgccggcagtttaataataaaaaaatgagagatttgcgatttctgcctcaggaaataatctctgctgagactggaaatgaaatattggagcttgtggtgcacgccctgatgggagacgatccggagccacctgtgcagctttttgagcctcctacgcttcaggaactgtatgatttagaggtagagggatcggaggattctaatgaggaagctgtaaatggcttttttaccgattctatgcttttagctgctaatgaagggttagaattagatccgcctttggacacttttgatactccaggggtaattgtggaaagcggtacaggtgtaagaaaattacctgatttgagttccgtggactgtgatttgcactgctatgaagacgggtttcctccgagtgatgaggaggaccatgaaaaggagcagtccatgcagactgcagcgggtgagggagtgaaggctgccaatgttggttttcagttggattgcccggagcttcctggacatggctgtaagtcttgtgaatttcacaggaaaaatactggagtaaaggaactgttatgttcgctttgttatatgagaacgcactgccactttatttacagtaagtgtgtttaagttaaaatttaaaggaatatgctgtttttcacatgtatattgagtgtgagttttgtgcttcttattataggtcctgtgtctgatgctgatgaatcaccatctcctgattctactacctcacctcctgagattcaagcacctgttcctgtggacgtgcgcaagcccattcctgtgaagcttaagcctgggaaacgtccagcagtggaaaaacttgaggacttgttacagggtggggacggacctttggacttgagtacacggaaacgtccaagacaataagtgttccatatccgtgtttacttaaggtgacgtcaatatttgtgtgacagtgcaatgtaataaaaatatgttaactgttcactggtttttattgctttttgggcggggactcaggtatataagtagaagcagacctgtgtggttagctcataggagctggctttcatccatggaggtttgggccattttggaagaccttaggaagactaggcaactgttagagaacgcttcggacggagtctccggtttttggagattctggttcgctagtgaattagctagggtagtttttaggataaaacaggactataaacaagaatttgaaaagttgttggtagattgcccaggactttttgaagctcttaatttgggccatcaggttcactttaaagaaaaagttttatcagttttagacttttcaaccccaggtagaactgctgctgctgtggcttttcttacttttatattagataaatggatcccgcagactcatttcagcaggggatacgttttggatttcatagccacagcattgtggagaacatggaaggttcgcaagatgaggacaatcttaggttactggccagtgcagcctttgggtgtagcgggaatcctgaggcatccaccggtcatgccagcggttctggaggaggaacagcaagaggacaacccgagagccggcctggaccctccagtggaggaggcggagtagctgacttgtctcctgaactgcaacgggtgcttactggatctacgtccactggacgggataggggcgttaagagggagagggcatctagtggtactgatgctagatctgagttggctttaagtttaatgagtcgcagacgtcctgaaaccatttggtggcatgaggttcagaaagagggaagggatgaagtttctgtattgcaggagaaatattcactggaacaggtgaaaacatgttggttggagcctgaggatgattgggaggtggccattaaaaattatgccaagatagctttgaggcctgataaacagtataagattactagacggattaatatccggaatgcttgttacatatctggaaatggggctgaggtggtaatagatactcaagacaaggcagttattagatgctgcatgatggatatgtggcctggggtagtcggtatggaagcagtaacttttgtaaatgttaagtttaggggagatggttataatggaatagtgtttatggccaataccaaacttatattgcatggttgtagcttttttggtttcaacaatacctgtgtagatgcctggggacaggttagtgtacggggatgtagtttctatgcgtgttggattgccacagctggcagaaccaagagtcaattgtctctgaagaaatgcatatttcaaagatgtaacctgggcattctgaatgaaggcgaagcaagggtccgccactgcgcttctacagatactggatgttttattttgattaagggaaatgccagcgtaaagcataacatgatttgcggtgcttccgatgagaggccttatcaaatgctcacttgtgctggtgggcattgtaatatgctggctactgtgcatattgtttcccatcaacgcaaaaaatggcctgtttttgatcacaatgtgatgacgaagtgtaccatgcatgcaggtgggcgtagaggaatgtttatgccttaccagtgtaacatgaatcatgtgaaagtgttgttggaaccagatgccttttccagaatgagcctaacaggaatttttgacatgaacatgcaaatctggaagatcctgaggtatgatgatacgagatcgagggtacgcgcatgcgaatgcggaggcaagcatgccaggttccagccggtgtgtgtagatgtgactgaagatctcagaccggatcatttggttattgcccgcactggagcagagttcggatccagtggagaagaaactgactaaggtgagtattgggaaaactttggggtgggattttcagatggacagattgagtaaaaatttgttttttctgtcttgcagctgtcatgagtggaaacgcttcttttaaggggggagtcttcagcccttatctgacagggcgtctcccatcctgggcaggagttcgtcagaatgttatgggatctactgtggatggaagacccgtccaacccgccaattcttcaacgctgacctatgctactttaagttcttcacctttggacgcagctgcagctgccgccgccgcttctgttgccgctaacactgtgcttggaatgggttactatggaagcatcatggctaattccacttcctctaataacccttctaccctgactcaggacaagttacttgtccttttggcccagctggaggctttgacccaacgtctgggtgaactttctcagcaggtggtcgagttgcgagtacaaactgagtctgctgtcggcacggcaaagtctaaataaaaaaatcccagaatcaatgaataaataaacaagcttgttgttgatttaaaatcaagtgtttttatttcatttttcgcgcacggtatgccctagaccaccgatctctatcattgagaactcggtggattttttccaggatcctatagaggtgggattgaatgtttagatacatgggcattaggccgtctttggggtggagatagctccattgaagggattcatgctccggggtagtgttgtaaatcacccagtcataacaaggtcgcagtgcatggtgttgcacaatatcttttagaagtaggctgattgccacagataagcccttggtgtaggtgtttacaaaccggttgagctgggatgggtgcattcggggtgaaattatgtgcattttggattggatttttaagttggcaatattgccgccaagatcccgtcttgggttcatgttatgaaggaccaccaagacggtgtatccggtacatttaggaaatttatcgtgcagcttggatggaaaagcgtggaaaaatttggagacacccttgtgtcctccaagattttccatgcactcatccatgataatagcaatggggccgtgggcagcggcgcgggcaaacacgttccgtgggtctgacacatcatagttatgttcctgagttaaatcatcataagccattttaatgaatttggggcggagagtaccagattggggtatgaatgttccttcgggccccggagcatagttcccctcacagatttgcatttcccaagctttcagttccgagggtggaatcatgtccacctggggggctatgaaaaacaccgtttctggggcgggggtgattaattgtgatgatagcaaatttctgagcaattgagatttgccacatccggtggggccataaatgattccgattacgggttgcaggtggtagtttagggaacggcaactgccgtcttctcgaagcaagggggccacctcgttcatcatttcccttacatgcatattttcccgcaccaaatccattaggaggcgctctcctcctagtgatagaagttcttgtagtgaggaaaagtttttcagcggtttcagaccgtcagccatgggcattttggagagagtttgctgcaaaagttctagtctgttccacagttcagtgatgtgttctatggcatctcgatccagcagacctcctcgtttcgcgggtttggacggctcctggaatagggtatgagacgatgggcgtccagcgctgccagggttcggtccttccagggtctcagtgttcgagtcagggttgtttccgtcacagtgaaggggtgtgcgcctgcttgggcgcttgccagggtgcgcttcagactcatcctgctggtcgaaaacttctgtcgcttggcgccctgtatgtcggccaagtagcagtttaccatgagttcgtagttgagcgcctcggctgcgtggcctttggcgcggagcttacctttggaagttttcttgcataccgggcagtataggcatttcagcgcatacaacttgggcgcaaggaaaacggattctggggagtatgcatctgcgccgcaggaggcgcaaacagtttcacattccaccagccaggttaaatccggttcattggggtcaaaaacaagttttccgccatattttttgatgcgtttcttacctttggtctccatgagttcgtgtcctcgttgagtgacaaacaggctgtccgtgtccccgtagactgattttacaggcctcttctccagtggagtgcctcggtcttcttcgtacaggaactctgaccactctgatacaaaggcgcgcgtccaggccagcacaaaggaggctatgtgggaggggtagcgatcgttgtcaaccagggggtccaccttttccaaagtatgcaaacacatgtcaccctcttcaacatccaggaatgtgattggcttgtaggtgtatttcacgtgacctggggtccccgctgggggggtataaaagggggcggttctttgctcttcctcactgtcttccggatcgctgtccaggaacgtcagctgttggggtaggtattccctctcgaaggcgggcatgacctctgcactcaggttgtcagtttctaagaacgaggaggatttgatattgacagtgccggttgagatgcctttcatgaggttttcgtccatctggtcagaaaacacaatttttttattgtcaagtttggtggcaaatgatccatacagggcgttggataaaagtttggcaatggatcgcatggtttggttcttttccttgtccgcgcgctctttggcggcgatgttgagttggacatactcgcgtgccaggcacttccattcggggaagatagttgttaattcatctggcacgattctcacttgccaccctcgattatgcaaggtaattaaatccacactggtggccacctcgcctcgaaggggttcattggtccaacagagcctacctcctttcctagaacagaaagggggaagtgggtctagcataagttcatcgggagggtctgcatccatggtaaagattcccggaagtaaatccttatcaaaatagctgatgggagtggggtcatctaaggccatttgccattctcgagctgccagtgcgcgctcatatgggttaaggggactgccccatggcatgggatgggtgagtgcagaggcatacatgccacagatgtcatagacgtagatgggatcctcaaagatgcctatgtaggttggatagcatcgcccccctctgatacttgctcgcacatagtcatatagttcatgtgatggcgctagcagccccggacccaagttggtgcgattgggtttttctgttctgtagacgatctggcgaaagatggcgtgagaattggaagagatggtgggtctttgaaaaatgttgaaatgggcatgaggtagacctacagagtctctgacaaagtgggcataagattcttgaagcttggttaccagttcggcggtgacaagtacgtctagggcgcagtagtcaagtgtttcttgaatgatgtcataacctggttggtttttcttttcccacagttcgcggttgagaaggtattcttcgcgatccttccagtactcttctagcggaaacccgtctttgtctgcacggtaagatcctagcatgtagaactgattaactgccttgtaagggcagcagcccttctctacgggtagagagtatgcttgagcagcttttcgtagcgaagcgtgagtaagggcaaaggtgtctctgaccatgactttgaggaattggtatttgaagtcgatgtcgtcacaggctccctgttcccagagttggaagtctacccgtttcttgtaggcggggttgggcaaagcgaaagtaacatcattgaagagaatcttgccggccctgggcatgaaattgcgagtgatgcgaaaaggctgtggtacttccgctcggttattgataacctgggcagctaggacgatctcgtcgaaaccgttgatgttgtgtcctacgatgtataattctatgaaacgcggcgtgcctctgacgtgaggtagcttactgagctcatcaaaggttaggtctgtggggtcagataaggcgtagtgttcgagagcccattcgtgcaggtgaggattcgctttaaggaaggaggaccagaggtccactgccagtgctgtttgtaactggtcccggtactgacgaaaatgccgtccgactgccattttttctggggtgacgcaatagaaggtttgggggtcctgccgccagcgatcccacttgagttttatggcgaggtcataggcgatgttgacgagccgctggtctccagagagtttcatgaccagcatgaaggggattagctgcttgccaaaggaccccatccaggtgtaggtttccacatcgtaggtgagaaagagcctttctgtgcgaggatgagagccaatcgggaagaactggatctcctgccaccagttggaggaatggctgttgatgtgatggaagtagaactccctgcgacgcgccgagcattcatgcttgtgcttgtacagacggccgcagtagtcgcagcgttgcacgggttgtatctcgtgaatgagttgtacctggcttcccttgacgagaaatttcagtgggaagccgaggcctggcgattgtatctcgtgctttactatgttgtctgcatcggcctgttcatcttctgtctcgatggtggtcatgctgacgagccctcgcgggaggcaagtccagacctcggcgcggcaggggcggagctcgaggacgagagcgcgcaggctggagctgtccagggtcctgagacgctgcggactcaggttagtaggcagtgtcaggagattaacttgcatgatcttttggagggcgtgcgggaggttcagatagtacttgatctcaacgggtccgttggtggagatgtcgatggcttgcagggttccgtgtcccttgggcgctaccaccgtgcccttgtttttcattttggacggcggtggctctgttgcttcttgcatgtttagaagcggtgtcgagggcgcgcaccgggcggcaggggcggctcgggacccggcggcatggctggcagtggtacgtcggcgccgcgcgcgggtaggttctggtactgcgccctgagaagactcgcatgcgcgacgacgcggcggttgacatcctggatctgacgcctctgggtgaaagctaccggccccgtgagcttgaacctgaaagagagttcaacagaatcaatctcggtatcgttgacggcggcttgcctaaggatttcttgcacgtcaccagagttgtcctggtaggcgatctccgccatgaactgctcgatctcttcctcttgaagatctccgcggcccgctctctcgacggtggccgcgaggtcgttggagatgcgcccaatgagttgagagaatgcattcatgcccgcctcgttccagacgcggctgtagaccacggcccccacgggatctctcgcgcgcatgaccacctgggcgaggttgagctccacgtggcgggtgaagaccgcatagttgcataggcgctggaaaaggtagttgagtgtggtggcgatgtgctcggtgacgaagaaatacatgatccatcgtctcagcggcatctcgctgacatcgcccagagcttccaagcgctccatggcctcgtagaagtccacggcaaaattaaaaaactgggagtttcgcgcggacacggtcaactcctcttccagaagacggataagttcggcgatggtggtgcgcacctcgcgctcgaaagcccctgggatttcttcctcaatctcttcttcttccactaacatctcttcctcttcaggtggggctgcaggaggagggggaacgcggcgacgccggcggcgcacgggcagacggtcgatgaatctttcaatgacctctccgcggcggcggcgcatggtttcagtgacggcgcggccgttctcgcgcggtcgcagagtaaaaacaccgccgcgcatctccttaaagtggtgactgggaggttctccgtttgggagggagagggcgctgattatacattttattaattggcccgtagggactgcacgcagagatctgatcgtgtcaagatccacgggatctgaaaacctttcgacgaaagcgtctaaccagtcacagtcacaaggtaggctgagtacggcttcttgtgggcgggggtggttatgtgttcggtctgggtcttctgtttcttcttcatctcgggaaggtgagacgatgctgctggtgatgaaattaaagtaggcagttctaagacggcggatggtggcgaggagcaccaggtctttgggtccggcttgctggatacgcaggcgattggccattccccaagcattatcctgacatctagcaagatctttgtagtagtcttgcatgagccgttctacgggcacttcttcctcacccgttctgccatgcatacgtgtgagtccaaatccgcgcattggttgtaccagtgccaagtcagctacgactctttcggcgaggatggcttgctgtacttgggtaagggtggcttgaaagtcatcaaaatccacaaagcggtggtaagctcctgtattaatggtgtaagcacagttggccatgactgaccagttaactgtctggtgaccagggcgcacgagctcggtgtatttaaggcgcgaataggcgcgggtgtcaaagatgtaatcgttgcaggtgcgcaccagatactggtaccctataagaaaatgcggcggtggttggcggtagagaggccatcgttctgtagctggagcgccaggggcgaggtcttccaacataaggcggtgatagccgtagatgtacctggacatccaggtgattcctgcggcggtagtagaagcccgaggaaactcgcgtacgcggttccaaatgttgcgtagcggcatgaagtagttcattgtaggcacggtttgaccagtgaggcgcgcgcagtcattgatgctctatagacacggagaaaatgaaagcgttcagcgactcgactccgtagcctggaggaacgtgaacgggttgggtcgcggtgtaccccggttcgagacttgtactcgagccggccggagccgcggctaacgtggtattggcactcccgtctcgacccagcctacaaaaatccaggatacggaatcgagtcgttttgctggtttccgaatggcagggaagtgagtcctattttttttttttgccgctcagatgcatcccgtgctgcgacagatgcgcccccaacaacagcccccctcgcagcagcagcagcagcaatcacaaaaggctgtccctgcaactactgcaactgccgccgtgagcggtgcgggacagcccgcctatgatctggacttggaagagggcgaaggactggcacgtctaggtgcgccttcacccgagcggcatccgcgagttcaactgaaaaaagattctcgcgaggcgtatgtgccccaacagaacctatttagagacagaagcggcgaggagccggaggagatgcgagcttcccgctttaacgcgggtcgtgagctgcgtcacggtttggaccgaagacgagtgttgcgggacgaggatttcgaagttgatgaaatgacagggatcagtcctgccagggcacacgtggctgcagccaaccttgtatcggcttacgagcagacagtaaaggaagagcgtaacttccaaaagtcttttaataatcatgtgcgaaccctgattgcccgcgaagaagttacccttggtttgatgcatttgtgggatttgatggaagctatcattcagaaccctactagcaaacctctgaccgcccagctgtttctggtggtgcaacacagcagagacaatgaggctttcagagaggcgctgctgaacatcaccgaacccgaggggagatggttgtatgatcttatcaacattctacagagtatcatagtgcaggagcggagcctgggcctggccgagaaggtggctgccatcaattactcggttttgagcttgggaaaatattacgctcgcaaaatctacaagactccatacgttcccatagacaaggaggtgaagatagatgggttctacatgcgcatgacgctcaaggtcttgaccctgagcgatgatcttggggtgtatcgcaatgacagaatgcatcgcgcggttagcgccagcaggaggcgcgagttaagcgacagggaactgatgcacagtttgcaaagagctctgactggagctggaaccgagggtgagaattacttcgacatgggagctgacttgcagtggcagcctagtcgcagggctctgagcgccgcgacggcaggatgtgagcttccttacatagaagaggcggatgaaggcgaggaggaagagggcgagtacttggaagactgatggcacaacccgtgttttttgctagatggaacagcaagcaccggatcccgcaatgcgggcggcgctgcagagccagccgtccggcattaactcctcggacgattggacccaggccatgcaacgtatcatggcgttgacgactcgcaaccccgaagcctttagacagcaaccccaggccaaccgtctatcggccatcatggaagctgtagtgccttcccgctctaatcccactcatgagaaggtcctggccatcgtgaacgcgttggtggagaacaaagctattcgtccagatgaggccggactggtatacaacgctctcttagaacgcgtggctcgctacaacagtagcaatgtgcaaaccaatttggaccgtatgataacagatgtacgcgaagccgtgtctcagcgcgaaaggttccagcgtgatgccaacctgggttcgctggtggcgttaaatgctttcttgagtactcagcctgctaatgtgccgcgtggtcaacaggattatactaactttttaagtgctttgagactgatggtatcagaagtacctcagagcgaagtgtatcagtccggtcctgattacttctttcagactagcagacagggcttgcagacggtaaatctgagccaagcttttaaaaaccttaaaggtttgtggggagtgcatgccccggtaggagaaagagcaaccgtgtctagcttgttaactccgaactcccgcctattattactgttggtagctcctttcaccgacagcggtagcatcgaccgtaattcctatttgggttacctactaaacctgtatcgcgaagccatagggcaaagtcaggtggacgagcagacctatcaagaaattacccaagtcagtcgcgctttgggacaggaagacactggcagtttggaagccactctgaacttcttgcttaccaatcggtctcaaaagatccctcctcaatatgctcttactgcggaggaggagaggatccttagatatgtgcagcagagcgtgggattgtttctgatgcaagagggggcaactccgactgcagcactggacatgacagcgcgaaatatggagcccagcatgtatgccagtaaccgacctttcattaacaaactgctggactacttgcacagagctgccgctatgaactctgattatttcaccaatgccatcttaaacccgcactggctgcccccacctggtttctacacgggcgaatatgacatgcccgaccctaatgacggatttctgtgggacgacgtggacagcgatgttttttcacctctttctgatcatcgcacgtggaaaaaggaaggcggcgatagaatgcattcttctgcatcgctgtccggggtcatgggtgctaccgcggctgagcccgagtctgcaagtccttttcctagtctacccttttctctacacagtgtacgtagcagcgaagtgggtagaataagtcgcccgagtttaatgggcgaagaggagtatctaaacgattccttgctcagaccggcaagagaaaaaaatttcccaaacaatggaatagaaagtttggtggataaaatgagtagatggaagacttatgctcaggatcacagagacgagcctgggatcatggggattacaagtagagcgagccgtagacgccagcgccatgacagacagaggggtcttgtgtgggacgatgaggattcggccgatgatagcagcgtgctggacttgggtgggagaggaaggggcaacccgtttgctcatttgcgccctcgcttgggtggtatgttgtaaaaaaaaataaaaaaaaaactcaccaaggccatggcgacgagcgtacgttcgttcttctttattatctgtgtctagtataatgaggcgagtcgtgctaggcggagcggtggtgtatccggagggtcctcctccttcgtacgagagcgtgatgcagcagcagcaggcgacggcggtgatgcaatccccactggaggctccctttgtgcctccgcgatacctggcacctacggagggcagaaacagcattcgttattcggaactggcacctcagtacgataccaccaggttgtatctggtggacaacaagtcggcggacattgcttctctgaactatcagaatgaccacagcaacttcttgaccacggtggtgcaaaacaatgactttacccctacggaagccagcacccagaccattaactttgatgaacgatcgcggtggggcggtcagctaaagaccatcatgcatactaacatgccaaacgtgaacgagtatatgtttagtaacaagttcaaagcgcgtgtgatggtgtccagaaaacctcccgacggtgctgcagttggggatacttatgatcacaagcaggatattttgaaatatgagtggttcgagtttactttgccagaaggcaacttttcagttactatgactattgatttgatgaacaatgccatcatagataattacttgaaagtgggtagacagaatggagtgcttgaaagtgacattggtgttaagttcgacaccaggaacttcaagctgggatgggatcccgaaaccaagttgatcatgcctggagtgtatacgtatgaagccttccatcctgacattgtcttactgcctggctgcggagtggattttaccgagagtcgtttgagcaaccttcttggtatcagaaaaaaacagccatttcaagagggttttaagattttgtatgaagatttagaaggtggtaatattccggccctcttggatgtagatgcctatgagaacagtaagaaagaacaaaaagccaaaatagaagctgctacagctgctgcagaagctaaggcaaacatagttgccagcgactctacaagggttgctaacgctggagaggtcagaggagacaattttgcgccaacacctgttccgactgcagaatcattattggccgatgtgtctgaaggaacggacgtgaaactcactattcaacctgtagaaaaagatagtaagaatagaagctataatgtgttggaagacaaaatcaacacagcctatcgcagttggtatctttcgtacaattatggcgatcccgaaaaaggagtgcgttcctggacattgctcaccacctcagatgtcacctgcggagcagagcaggtctactggtcgcttccagacatgatgaaggatcctgtcactttccgctccactagacaagtcagtaactaccctgtggtgggtgcagagcttatgcccgtcttctcaaagagcttctacaacgaacaagctgtgtactcccagcagctccgccagtccacctcgcttacgcacgtcttcaaccgctttcctgagaaccagattttaatccgtccgccggcgcccaccattaccaccgtcagtgaaaacgttcctgctctcacagatcacgggaccctgccgttgcgcagcagtatccggggagtccaacgtgtgaccgttactgacgccagacgccgcacctgtccctacgtgtacaaggcactgggcatagtcgcaccgcgcgtcctttcaagccgcactttctaaaaaaaaaaaaaatgtccattcttatctcgcccagtaataacaccggttggggtctgcgcgctccaagcaagatgtacggaggcgcacgcaaacgttctacccaacatcctgtccgtgttcgcggacattttcgcgctccatggggcgccctcaagggccgcactcgcgttcgaaccaccgtcgatgatgtaatcgatcaggtggttgccgacgcccgtaattatactcctactgcgcctacatctactgtggatgcagttattgacagtgtagtggctgacgctcgcaactatgctcgacgtaagagccggcgaaggcgcattgccagacgccaccgagctaccactgccatgcgagccgcaagagctctgctacgaagagctagacgcgtggggcgaagagccatgcttagggcggccagacgtgcagcttcgggcgccagcgccggcaggtcccgcaggcaagcagccgctgtcgcagcggcgactattgccgacatggcccaatcgcgaagaggcaatgtatactgggtgcgtgacgctgccaccggtcaacgtgtacccgtgcgcacccgtccccctcgcacttagaagatactgagcagtctccgatgttgtgtcccagcggcgaggatgtccaagcgcaaatacaaggaagaaatgctgcaggttatcgcacctgaagtctacggccaaccgttgaaggatgaaaaaaaaccccgcaaaatcaagcgggttaaaaaggacaaaaaagaagaggaagatggcgatgatgggctggcggagtttgtgcgcgagtttgccccacggcgacgcgtgcaatggcgtgggcgcaaagttcgacatgtgttgagacctggaacttcggtggtctttacacccggcgagcgttcaagcgctacttttaagcgttcctatgatgaggtgtacggggatgatgatattcttgagcaggcggctgaccgattaggcgagtttgcttatggcaagcgtagtagaataacttccaaggatgagacagtgtcgatacccttggatcatggaaatcccacccctagtcttaaaccggtcactttgcagcaagtgttacccgtaactccgcgaacaggtgttaaacgcgaaggtgaagatttgtatcccactatgcaactgatggtacccaaacgccagaagttggaggacgttttggagaaagtaaaagtggatccagatattcaacctgaggttaaagtgagacccattaagcaggtagcgcctggtctgggggtacaaactgtagacattaagattcccactgaaagtatggaagtgcaaactgaacccgcaaagcctactgccacctccactgaagtgcaaacggatccatggatgcccatgcctattacaactgacgccgccggtcccactcgaagatcccgacgaaagtacggtccagcaagtctgttgatgcccaattatgttgtacacccatctattattcctactcctggttaccgaggcactcgctactatcgcagccgaaacagtacctcccgccgtcgccgcaagacacctgcaaatcgcagtcgtcgccgtagacgcacaagcaaaccgactcccggcgccctggtgcggcaagtgtaccgcaatggtagtgcggaacctttgacactgccgcgtgcgcgttaccatccgagtatcatcacttaatcaatgttgccgctgcctccttgcagatatggccctcacttgtcgccttcgcgttcccatcactggttaccgaggaagaaactcgcgccgtagaagagggatgttgggacgcggaatgcgacgctacaggcgacggcgtgctatccgcaagcaattgcggggtggttttttaccagccttaattccaattatcgctgctgcaattggcgcgataccaggcatagcttccgtggcggttcaggcctcgcaacgacattgacattggaaaaaaacgtataaataaaaaaaaaaaaatacaatggactctgacactcctggtcctgtgactatgttttcttagagatggaagacatcaatttttcatccttggctccgcgacacggcacgaagccgtacatgggcacctggagcgacatcggcacgagccaactgaacgggggcgccttcaattggagcagtatctggagcgggcttaaaaattttggctcaaccataaaaacatacgggaacaaagcttggaacagcagtacaggacaggcgcttagaaataaacttaaagaccagaacttccaacaaaaagtagtcgatgggatagcttccggcatcaatggagtggtagatttggctaaccaggctgtgcagaaaaagataaacagtcgtttggacccgccgccagcaaccccaggtgaaatgcaagtggaggaagaaattcctccgccagaaaaacgaggcgacaagcgtccgcgtcccgatttggaagagacgctggtgacgcgcgtagatgaaccgccttcttatgaggaagcaacgaagcttggaatgcccaccactagaccgatagccccaatggccaccggggtgatgaaaccttctcagttgcatcgacccgtcaccttggatttgccccctccccctgctgctactgctgtacccgcttctaagcctgtcgctgccccgaaaccagtcgccgtagccaggtcacgtcccgggggcgctcctcgtccaaatgcgcactggcaaaatactctgaacagcatcgtgggtctaggcgtgcaaagtgtaaaacgccgtcgctgcttttaattaaatatggagtagcgcttaacttgcctatctgtgtatatgtgtcattacacgccgtcacagcagcagaggaaaaaaggaagaggtcgtgcgtcgacgctgagttactttcaagatggccaccccatcgatgctgccccaatgggcatacatgcacatcgccggacaggatgcttcggagtacctgagtccgggtctggtgcagttcgcccgcgccacagacacctacttcaatctgggaaataagtttagaaatcccaccgtagcgccgacccacgatgtgaccaccgaccgtagccagcggctcatgttgcgcttcgtgcccgttgaccgggaggacaatacatactcttacaaagtgcggtacaccctggccgtgggcgacaacagagtgctggatatggccagcacgttctttgacattaggggtgtgttggacagaggtcccagtttcaaaccctattctggtacggcttacaactccctggctcctaaaggcgctccaaatacatctcagtggattgcagaaggtgtaaaaaatacaactggtgaggaacacgtaacagaagaggaaaccaatactactacttacacttttggcaatgctcctgtaaaagctgaagctgaaattacaaaagaaggactcccagtaggtttggaagtttcagatgaagaaagtaaaccgatttatgctgataaaacatatcagccagaacctcagctgggagatgaaacttggactgaccttgatggaaaaaccgaaaagtatggaggcagggctctcaaacccgatactaagatgaaaccatgctacgggtcctttgccaaacctactaatgtgaaaggcggtcaggcaaaacaaaaaacaacggagcagccaaatcagaaagtcgaatatgatatcgacatggagttttttgatgcggcatcgcagaaaacaaacttaagtcctaaaattgtcatgtatgcagaaaatgtaaatttggaaactccagacactcatgtagtgtacaaacctggaacagaagacacaagttccgaagctaatttgggacaacaatctatgcccaacagacccaactacattggcttcagagataactttattggacttatgtactataacagtactggtaacatgggggtgctggctggtcaagcgtctcagttaaatgcagtggttgacttgcaggacagaaacacagaactttcttaccaactcttgcttgactctctgggcgacagaaccagatactttagcatgtggaatcaggctgtggacagttatgatcctgatgtacgtgttattgaaaatcatggtgtggaagatgaacttcccaactactgttttccactggacggcataggtgttccaacaaccagttacaaatcaatagttccaaatggagacaatgcgcctaattggaaggaacctgaagtaaatggaacaagtgagatcggacagggtaatttgtttgccatggaaattaaccttcaagccaatctatggcgaagtttcctttattccaatgtggctctatatctcccagactcgtacaaatacaccccgtccaatgtcactcttccagaaaacaaaaacacctacgactacatgaacgggcgggtggtgccgccatctctagtagacacctatgtgaacattggtgccaggtggtctctggatgccatggacaatgtcaacccattcaaccaccaccgtaacgctggcttgcgttaccgatccatgcttctgggtaacggacgttatgtgcctttccacatacaagtgcctcaaaaattcttcgctgttaaaaacctgctgcttctcccaggctcctacacttatgagtggaactttaggaaggatgtgaacatggttctacagagttccctcggtaacgacctgcgggtagatggcgccagcatcagtttcacgagcatcaacctctatgctacttttttccccatggctcacaacaccgcttccacccttgaagccatgctgcggaatgacaccaatgatcagtcattcaacgactacctatctgcagctaacatgctctaccccattcctgccaatgcaaccaatattcccatttccattccttctcgcaactgggcggctttcagaggctggtcatttaccagactgaaaaccaaagaaactccctctttggggtctggatttgacccctactttgtctattctggttctattccctacctggatggtaccttctacctgaaccacacttttaagaaggtttccatcatgtttgactcttcagtgagctggcctggaaatgacaggttactatctcctaacgaatttgaaataaagcgcactgtggatggcgaaggctacaacgtagcccaatgcaacatgaccaaagactggttcttggtacagatgctcgccaactacaacatcggctatcagggcttctacattccagaaggatacaaagatcgcatgtattcatttttcagaaacttccagcccatgagcaggcaggtggttgatgaggtcaattacaaagacttcaaggccgtcgccataccctaccaacacaacaactctggctttgtgggttacatggctccgaccatgcgccaaggtcaaccctatcccgctaactatccctatccactcattggaacaactgccgtaaatagtgttacgcagaaaaagttcttgtgtgacagaaccatgtggcgcataccgttctcgagcaacttcatgtctatgggggcccttacagacttgggacagaatatgctctatgccaactcagctcatgctctggacatgacctttgaggtggatcccatggatgagcccaccctgctttatcttctcttcgaagttttcgacgtggtcagagtgcatcagccacaccgcggcatcatcgaggcagtctacctgcgtacaccgttctcggccggtaacgctaccacgtaagaagcttcttgcttcttgcaaatagcagctgcaaccatggcctgcggatcccaaaacggctccagcgagcaagagctcagagccattgtccaagacctgggttgcggaccctattttttgggaacctacgataagcgcttcccggggttcatggcccccgataagctcgcctgtgccattgtaaatacggccggacgtgagacggggggagagcactggttggctttcggttggaacccacgttctaacacctgctacctttttgatccttttggattctcggatgatcgtctcaaacagatttaccagtttgaatatgagggtctcctgcgccgcagcgctcttgctaccaaggaccgctgtattacgctggaaaaatctacccagaccgtgcagggtccccgttctgccgcctgcggacttttctgctgcatgttccttcacgcctttgtgcactggcctgaccgtcccatggacggaaaccccaccatgaaattgctaactggagtgccaaacaacatgcttcattctcctaaagtccagcccaccctgtgtgacaatcaaaaagcactctaccattttcttaatacccattcgccttattttcgctcccatcgtacacacatcgaaagggccactgcgttcgaccgtatggatgttcaataatgactcatgtaaacaacgtgttcaataaacatcactttatttttttacatgtatcaaggctctgcattacttatttatttacaagtcgaatgggttctgacgagaatcagaatgacccgcaggcagtgatacgttgcggaactgatacttgggttgccacttgaattcgggaatcaccaacttgggaaccggtatatcgggcaggatgtcactccacagctttctggtcagctgcaaagctccaagcaggtcaggagccgaaatcttgaaatcacaattaggaccagtgctttgagcgcgagagttgcggtacaccggattgcagcactgaaacaccatcagcgacggatgtctcacgcttgccagcacggtgggatctgcaatcatgcccacatccagatcttcagcattggcaatgctgaacggggtcatcttgcaggtctgcctacccatggcgggcacccaattaggcttgtggttgcaatcgcagtgcagggggatcagtatcatcttggcctgatcctgtctgattcctggatacacggctctcatgaaagcatcatattgcttgaaagcctgctgggctttactaccctcggtataaaacatcccgcaggacctgctcgaaaactggttagctgcacagccggcatcattcacacagcagcgggcgtcattgttagctatttgcaccacacttctgccccagcggttttgggtgattttggttcgctcgggattctcctttaaggctcgttgtccgttctcgctggccacatccatctcgataatctgctccttctgaatcataatattgccatgcaggcacttcagcttgccctcataatcattgcagccatgaggccacaacgcacagcctgtacattcccaattatggtgggcgatctgagaaaaagaatgtatcattccctgcagaaatcttcccatcatcgtgctcagtgtcttgtgactagtgaaagttaactggatgcctcggtgctcctcgtttacgtactggtgacagatgcgcttgtattgttcgtgttgctcaggcattagtttaaaagaggttctaagttcgttatccagcctgtacttctccatcagcagacacatcacttccatgcctttctcccaagcagacaccaggggcaagctaatcggattcttaacagtgcaggcagcagctcctttagccagagggtcatctttagcgatcttctcaatgcttcttttgccatccttctcaacgatgcgcacgggcgggtagctgaaacccactgctacaagttgcgcctcttctctttcttcttcgctgtcttgactgatgtcttgcatggggatatgtttggtcttccttggcttctttttggggggtatcggaggaggaggactgtcgctccgttccggagacagggaggattgtgacgtttcgctcaccattaccaactgactgtcggtagaagaacctgaccccacacggcgacaggtgtttctcttcgggggcagaggtggaggcgattgcgaagggctgcggtccgacctggaaggcggatgactggcagaaccccttccgcgttcgggggtgtgctccctgtggcggtcgcttaactgatttccttcgcggctggccattgtgttctcctaggcagagaaacaacagacatggaaactcagccattgctgtcaacatcgccacgagtgccatcacatctcgtcctcagcgacgaggaaaaggagcagagcttaagcattccaccgcccagtcctgccaccacctctaccctagaagataaggaggtcgacgcatctcatgacatgcagaataaaaaagcgaaagagtctgagacagacatcgagcaagacccgggctatgtgacaccggtggaacacgaggaagagttgaaacgctttctagagagagaggatgaaaactgcccaaaacaacgagcagataactatcaccaagatgctggaaatagggatcagaacaccgactacctcatagggcttgacggggaagacgcgctccttaaacatctagcaagacagtcgctcatagtcaaggatgcattattggacagaactgaagtgcccatcagtgtggaagagctcagccgcgcctacgagcttaacctcttttcacctcgtactccccccaaacgtcagccaaacggcacctgcgagccaaatcctcgcttaaacttttatccagcttttgctgtgccagaagtactggctacctatcacatcttttttaaaaatcaaaaaattccagtctcctgccgcgctaatcgcacccgcgccgatgccctactcaatctgggacctggttcacgcttacctgatatagcttccttggaagaggttccaaagatcttcgagggtctgggcaataatgagactcgggccgcaaatgctctgcaaaagggagaaaatggcatggatgagcatcacagcgttctggtggaattggaaggcgataatgccagactcgcagtactcaagcgaagcatcgaggtcacacacttcgcatatcccgctgtcaacctgccccctaaagtcatgacggcggtcatggaccagttactcattaagcgcgcaagtcccctttcagaagacatgcatgacccagatgcctgtgatgagggtaaaccagtggtcagtgatgagcagctaacccgatggctgggcaccgactctcccagggatttggaagagcgtcgcaagcttatgatggccgtggtgctggttaccgtagaactagagtgtctccgacgtttctttaccgattcagaaaccttgcgcaaactcgaagagaatctgcactacacttttagacacggctttgtgcggcaggcatgcaagatatctaacgtggaactcaccaacctggtttcctacatgggtattctgcatgagaatcgcctaggacaaagcgtgctgcacagcaccctgaagggggaagcccgccgtgattacatccgcgattgtgtctatctgtacctgtgccacacgtggcaaaccggcatgggtgtatggcagcaatgtttagaagaacagaacttgaaagagcttgacaagctcttacagaaatctcttaaggttctgtggacagggttcgacgagcgcaccgtcgcttccgacctggcagacctcatcttcccagagcgtctcagggttactttgcgaaacggattgcctgactttatgagccagagcatgcttaacaattttcgctctttcatcctggaacgctccggtatcctgcccgccacctgctgcgcactgccctccgactttgtgcctctcacctaccgcgagtgccccccgccgctatggagtcactgctacctgttccgtctggccaactatctctcctaccactcggatgtgatcgaggatgtgagcggagacggcttgctggagtgtcactgccgctgcaatctgtgcacgccccaccggtccctagcttgcaacccccagttgatgagcgaaacccagataataggcacctttgaattgcaaggccccagcagccaaggcgatgggtcttctcctgggcaaagtttaaaactgaccccgggactgtggacctccgcctacttgcgcaagtttgctccggaagattaccacccctatgaaatcaagttctatgaggaccaatcacagcctccaaaggccgaactttcggcctgcgtcatcacccagggggcaattctggcccaattgcaagccatccaaaaatcccgccaagaatttctactgaaaaagggtaagggggtctaccttgacccccagaccggcgaggaactcaacacaaggttccctcaggatgtcccaacgacgagaaaacaagaagttgaaggtgcagccgccgcccccagaagatatggaggaagattgggacagtcaggcagaggaggcggaggaggacagtctggaggacagtctggaggaagacagtttggaggaggaaaacgaggaggcagaggaggtggaagaagtaaccgccgacaaacagttatcctcggctgcggagacaagcaacagcgctaccatctccgctccgagtcgaggaacccggcggcgtcccagcagtagatgggacgagaccggacgcttcccgaacccaaccagcgcttccaagaccggtaagaaggatcggcagggatacaagtcctggcgggggcataagaatgccatcatctcctgcttgcatgagtgcgggggcaacatatccttcacgcggcgctacttgctattccaccatggggtgaactttccgcgcaatgttttgcattactaccgtcacctccacagcccctactatagccagcaaatcccggcagtctcgacagataaagacagcggcggcgacctccaacagaaaaccagcagcggcagttagaaaatacacaacaagtgcagcaacaggaggattaaagattacagccaacgagccagcgcaaacccgagagttaagaaatcggatctttccaaccctgtatgccatcttccagcagagtcggggtcaagagcaggaactgaaaataaaaaaccgatctctgcgttcgctcaccagaagttgtttgtatcacaagagcgaagatcaacttcagcgcactctcgaggacgccgaggctctcttcaacaagtactgcgcgctgactcttaaagagtaggcagcgaccgcgcttattcaaaaaaggcgggaattacatcatcctcgacatgagtaaagaaattcccacgccttacatgtggagttatcaaccccaaatgggattggcggcaggcgcctcccaggactactccacccgcatgaattggctcagcgccgggccttctatgatttctcgagttaatgatatacgcgcctaccgaaaccaaatacttttggaacagtcagctcttaccaccacgccccgccaacaccttaatcccagaaattggcccgccgccctagtgtaccaggaaagtcccgctcccaccactgtattacttcctcgagacgcccaggccgaagtccaaatgactaatgcaggtgcgcagttagctggcggctccaccctatgtcgtcacaggcctcggcataatataaaacgcctgatgatcagaggccgaggtatccagctcaacgacgagtcggtgagctctccgcttggtctacgaccagacggaatctttcagattgccggctgcgggagatcttccttcacccctcgtcaggctgttctgactttggaaagttcgtcttcgcaaccccgctcgggcggaatcgggaccgttcaatttgtggaggagtttactccctctgtctacttcaaccccttctccggatctcctgggcattacccggacgagttcataccgaacttcgacgcgattagcgagtcagtggacggctacgattgatgtctggtgacgcggctgagctatctcggctgcgacatctagaccactgccgccgctttcgctgctttgcccgggaactcattgagttcatctacttcgaactccccaaggatcaccctcaaggtccggcccacggagtgcggatttctatcgaaggcaaaatagactctcgcctgcaacgaattttctcccagcggcccgtgctgatcgagcgagaccagggaaacaccacggtttccatctactgcatttgtaatcaccccggattgcatgaaagcctttgctgtcttatgtgtactgagtttaataaaaactgaattaagactctcctacggactgccgcttcttcaacccggattttacaaccagaagaacgaaacttttcctgtcgtccaggactctgttaacttcacctttcctactcacaaactagaagctcaacgactacaccgcttttccagaagcattttccctactaatactactttcaaaaccggaggtgagctccaaggtcttcctacagaaaacccttgggtggaagcgggccttgtagtgctaggaattcttgcgggtgggcttgtgattattctttgctacctatacacaccttgcttcactttcttagtggtgttgtggtattggtttaaaaaatggggcccatactagtcttgcttgttttactttcgcttttggaaccgggttctgccaattacgatccatgtctagacttcgacccagaaaactgcacacttacttttgcacccgacacaagccgcatctgtggagttcatcgcctctcttacgaacttggcccccaacgacaaaaatttacctgcatggtgggaatcaaccccatagttatcacccagcaaagtggagatactaagggttgcattcactgctcctgcgattccatcgagtgcacctacaccctgctgaagaccctatgcggcctaagagacctgctaccaatgaattaaaaaatgattaataaaaaatcacttacttgaaatcagcaataaggtctctgttgaaattttctcccagcagcacctcacttccctcttcccaactctggtattctaaaccccgttcagcggcatactttctccatactttaaaggggatgtcaaattttagctcctctcctgtacccacaatcttcatgtctttcttcccagatgaccaagagagtccggctcagtgactccttcaaccctgtctacccctatgaagatgaaagcacctcccaacacccctttataaacccagggtttatttccccaaatggcttcacacaaagcccaaacggagttcttactttaaaatgtttaaccccactaacaaccacaggcggatctctacagctaaaagtgggagggggacttacagtggatgacaccaacggttttttgaaagaaaacataagtgccaccacaccactcgttaagactggtcactctataggtttaccactaggagccggattgggaacgaatgaaaataaactttgtatcaaattaggacaaggacttacattcaattcaaacaacatttgcattgatgacaatattaacaccttatggacaggagtcaaccccaccgaagccaactgtcaaatcatgaactccagtgaatctaatgattgcaaattaattctaacactagttaaaactggagcactagtcactgcatttgtttatgttataggagtatctaacaattttaatatgctaactacacacagaaatataaattttactgcagagctgtttttcgattctactggtaatttactaactagactctcatccctcaaaactccacttaatcataaatcaggacaaaacatggctactggtgccattactaatgctaaaggtttcatgcccagcacgactgcctatcctttcaatgataattctagagaaaaagaaaactacatttacggaacttgttactacacagctagtgatcgcactgcttttcccattgacatatctgtcatgcttaaccgaagagcaataaatgacgagacatcatattgtattcgtataacttggtcctggaacacaggagatgccccagaggtgcaaacctctgctacaaccctagtcacctccccatttaccttttactacatcagagaagacgactgacaaataaagtttgcgatcgccaggccgccatgagcactgaaagcatgatccgggacgtggagctggccgaggaggcgctccccaagaagacaggggggccccagggctccaggcggtgcttgttcctcagcctcttctccttcctgatcgtggcaggcgccaccacgctcttctgcctgctgcactttggagtgatcggcccccagagggaagagttccccagggacctctctctaatcagccctctggcccaggcagtcagatcatcttctcgaaccccgagtgacaagcctgtagcccatgttgtagcaaaccctcaagctgaggggcagctccagtggctgaaccgccgggccaatgccctcctggccaatggcgtggagctgagagataaccagctggtggtgccatcagagggcctgtacctcatctactcccaggtcctcttcaagggccaaggctgcccctccacccatgtgctcctcacccacaccatcagccgcatcgccgtctcctaccagaccaaggtcaacctcctctctgccatcaagagcccctgccagagggagaccccagagggggctgaggccaagccctggtatgagcccatctatctgggaggggtcttccagctggagaagggtgaccgactcagcgctgagatcaatcggcccgactatctcgactttgccgagtctgggcaggtctactttgggatcattgccctgtgagctagcttgactgactgagatacagcgtaccttcagctcacagacatgataagatacattgatgagtttggacaaaccacaactagaatgcagtgaaaaaaatgctttatttgtgaaatttgtgatgctattgctttatttgtaaccattataagctgcaataaacaagttaacaacaacaattgcattcattttatgtttcaggttcagggggaggtgtgggaggttttttaaagcaagtaaaacctctacaaatgtggtcctgcaggaacttgtttatttgaaaatcaattcacaaaatccgagtagttattttgcctcccccttcccatttaacagaatacaccaatctctccccacgcacagctttaaacatttggataccattagatatagacatggttttagattccacattccaaacagtttcagagcgagccaatctggggtcagtgatagataaaaatccatcgggatagtcttttaaagcgctttcacagtccaactgctgcggatgcgactccggagtctggatcacggtcatctggaagaagaacgatgggaatcataatccgaaaacggtatcggacgattgtgtctcatcaaacccacaagcagccgctgtctgcgtcgctccgtgcgactgctgtttatgggatcagggtccacagtgtcctgaagcatgattttaatagcccttaacatcaactttctggtgcgatgcgcgcagcaacgcattctgatttcactcaaatctttgcagtaggtacaacacattattacaatattgtttaataaaccataattaaaagcgctccagccaaaactcatatctgatataatcgcccctgcatgaccatcataccaaagtttaatataaattaaatgacgttccctcaaaaacacactacccacatacatgatctcttttggcatgtgcatattaacaatctgtctgtaccatggacaacgttggttaatcatgcaacccaatataaccttccggaaccacactgccaacaccgctcccccagccatgcattgaagtgaaccctgctgattacaatgacaatgaagaacccaattctctcgaccgtgaatcacttgagaatgaaaaatatctatagtggcacaacatagacataaatgcatgcatcttctcataatttttaactcctcaggatttagaaacatatcccagggaataggaagctcttgcagaacagtaaagctggcagaacaaggaagaccacgaacacaacttacactatgcatagtcatagtatcacaatctggcaacagcgggtggtcttcagtcatagaagctcgggtttcattttcctcacaacgtggtaactgggctctggtgtaagggtgatgtctggcgcatgatgtcgagcgtgcgcgcaaccttgtcataatggagttgcttcctgacattctcgtattttgtatagcaaaacgcggccctggcagaacacactcttcttcgccttctatcctgccgcttagcgtgttccgtgtgatagttcaagtacaaccacactcttaagttggtcaaaagaatgctggcttcagttgtaatcaaaactccatcgcatctaatcgttctgaggaaatcatccaagcaatgcaactggattgtgtttcaagcaggagaggagagggaagagacggaagaaccatgttaatttttattccaaacgatctcgcagtacttcaaattgtagatcgcgcagatggcatctctcgcccccactgtgttggtgaaaaagcacagctagatcaaaagaaatgcgattttcaaggtgctcaacggtggcttccagcaaagcctccacgcgcacatccaagaacaaaagaataccaaaagaaggagcattttctaactcctcaatcatcatattacattcctgcaccattcccagataattttcagctttccagccttgaattattcgtgtcagttcttgtggtaaatccaatccacacattacaaacaggtcccggagggcgccctccaccaccattcttaaacacaccctcataatgacaaaatatcttgctcctgtgtcacctgtagcgaattgagaatggcaacatcaattgacatgcccttggctctaagttcttctttaagttctagttgtaaaaactctctcatattatcaccaaactgcttagccagaagccccccgggaacaagagcaggggacgctacagtgcagtacaagcgcagacctccccaattggctccagcaaaaacaagattggaataagcatattgggaaccgccagtaatatcatcgaagttgctggaaatataatcaggcagagtttcttgtaaaaattgaataaaagaaaaatttgccaaaaaaacattcaaaacctctgggatgcaaatgcaataggttaccgcgctgcgctccaacattgttagttttgaattagtctgcaaaaataaaaaaaaaaacaagcgtcatatcatagtagcctgacgaacagatggataaatcagtctttccatcacaagacaagccacagggtctccagctcgaccctcgtaaaacctgtcatcatgattaaacaacagcaccgaaagttcctcgcggtgaccagcatgaataattcttgatgaagcatacaatccagacatgttagcatcagttaacgagaaaaaacagccaacatagcctttgggtataattatgcttaatcgtaagtatagcaaagccacccctcgcggatacaaagtaaaaggcacaggagaataaaaaatataattatttctctgctgctgttcaggcaacgtcgcccccggtccctctaaatacacatacaaagcctcatcagccatggcttaccagacaaagtacagcgggcacacaaagcacaagctctaaagtgactctccaacctctccacaatatatatatacacaagccctaaactgacgtaatgggagtaaagtgtaaaaaatcccgccaaacccaacacacaccccgaaactgcgtcaccagggaaaagtacagtttcacttccgcaatcccaacaggcgtaacttcctctttctcacggtacgtgatatcccactaacttgcaacgtcattttcccacggtcgcaccgccccttttagccgttaaccccacagccaatcaccacacgatccacactttttaaaatcacctcatttacatattggcaccattccatctataaggtatattatatagataga

SEQ ID NO: 54 - DNA, 19 bp, Artificial Sequence
  Restriction site insert (BY)
gcgatcgctaccctgcagg

SEQ ID NO: 55 - DNA, 19 bp, Artificial Sequence
  Restriction site insert (BX)
gcggccgctatggccggcc

SEQ ID NO: 56 - DNA, 33770 bp, Artificial Sequence
  NG-220 virus genome sequence consisting of a transgene cassette that encodes the tumour associated antigen, NY-ESO-1, inserted in the region BY.
tctatctatataatataccttatagatggaatggtgccaatatgtaaatgaggtgattttaaaaagtgtggatcgtgtggtgattggctgtggggttaacggctaaaaggggcggtgcgaccgtgggaaaatgacgttttgtgggggtggagtttttttgcaagttgtcgcgggaaatgtgacgcataaaaaggcttttttctcacggaactacttagttttcccacggtatttaacaggaaatgaggtagttttgaccggatgcaagtgaaaattgttgattttcgcgcgaaaactgaatgaggaagtgtttttctgaataatgtggtatttatggcagggtggagtatttgttcagggccaggtagactttgacccattacgtggaggtttcgattaccgtgttttttacctgaatttccgcgtaccgtgtcaaagtcttctgtttttacgtaggtgtcagctgatcgctagggtatttatacctcagggtttgtgtcaagaggccactcttgagtgccagcgagaagagttttctcctctgcgccggcagtttaataataaaaaaatgagagatttgcgatttctgcctcaggaaataatctctgctgagactggaaatgaaatattggagcttgtggtgcacgccctgatgggagacgatccggagccacctgtgcagctttttgagcctcctacgcttcaggaactgtatgatttagaggtagagggatcggaggattctaatgaggaagctgtaaatggcttttttaccgattctatgcttttagctgctaatgaagggttagaattagatccgcctttggacacttttgatactccaggggtaattgtggaaagcggtacaggtgtaagaaaattacctgatttgagttccgtggactgtgatttgcactgctatgaagacgggtttcctccgagtgatgaggaggaccatgaaaaggagcagtccatgcagactgcagcgggtgagggagtgaaggctgccaatgttggttttcagttggattgcccggagcttcctggacatggctgtaagtcttgtgaatttcacaggaaaaatactggagtaaaggaactgttatgttcgctttgttatatgagaacgcactgccactttatttacagtaagtgtgtttaagttaaaatttaaaggaatatgctgtttttcacatgtatattgagtgtgagttttgtgcttcttattataggtcctgtgtctgatgctgatgaatcaccatctcctgattctactacctcacctcctgagattcaagcacctgttcctgtggacgtgcgcaagcccattcctgtgaagcttaagcctgggaaacgtccagcagtggaaaaacttgaggacttgttacagggtggggacggacctttggacttgagtacacggaaacgtccaagacaataagtgttccatatccgtgtttacttaaggtgacgtcaatatttgtgtgacagtgcaatgtaataaaaatatgttaactgttcactggtttttattgctttttgggcggggactcaggtatataagtagaagcagacctgtgtggttagctcataggagctggctttcatccatggaggtttgggccattttggaagaccttaggaagactaggcaactgttagagaacgcttcggacggagtctccggtttttggagattctggttcgctagtgaattagctagggtagtttttaggataaaacaggactataaacaagaatttgaaaagttgttggtagattgcccaggactttttgaagctcttaatttgggccatcaggttcactttaaagaaaaagttttatcagttttagacttttcaaccccaggtagaactgctgctgctgtggcttttcttacttttatattagataaatggatcccgcagactcatttcagcaggggatacgttttggatttcatagccacagcattgtggagaacatggaaggttcgcaagatgaggacaatcttaggttactggccagtgcagcctttgggtgtagcgggaatcctgaggcatccaccggtcatgccagcggttctggaggaggaacagcaagaggacaacccgagagccggcctggaccctccagtggaggaggcggagtagctgacttgtctcctgaactgcaacgggtgcttactggatctacgtccactggacgggataggggcgttaagagggagagggcatctagtggtactgatgctagatctgagttggctttaagtttaatgagtcgcagacgtcctgaaaccatttggtggcatgaggttcagaaagagggaagggatgaagtttctgtattgcaggagaaatattcactggaacaggtgaaaacatgttggttggagcctgaggatgattgggaggtggccattaaaaattatgccaagatagctttgaggcctgataaacagtataagattactagacggattaatatccggaatgcttgttacatatctggaaatggggctgaggtggtaatagatactcaagacaaggcagttattagatgctgcatgatggatatgtggcctggggtagtcggtatggaagcagtaacttttgtaaatgttaagtttaggggagatggttataatggaatagtgtttatggccaataccaaacttatattgcatggttgtagcttttttggtttcaacaatacctgtgtagatgcctggggacaggttagtgtacggggatgtagtttctatgcgtgttggattgccacagctggcagaaccaagagtcaattgtctctgaagaaatgcatatttcaaagatgtaacctgggcattctgaatgaaggcgaagcaagggtccgccactgcgcttctacagatactggatgttttattttgattaagggaaatgccagcgtaaagcataacatgatttgcggtgcttccgatgagaggccttatcaaatgctcacttgtgctggtgggcattgtaatatgctggctactgtgcatattgtttcccatcaacgcaaaaaatggcctgtttttgatcacaatgtgatgacgaagtgtaccatgcatgcaggtgggcgtagaggaatgtttatgccttaccagtgtaacatgaatcatgtgaaagtgttgttggaaccagatgccttttccagaatgagcctaacaggaatttttgacatgaacatgcaaatctggaagatcctgaggtatgatgatacgagatcgagggtacgcgcatgcgaatgcggaggcaagcatgccaggttccagccggtgtgtgtagatgtgactgaagatctcagaccggatcatttggttattgcccgcactggagcagagttcggatccagtggagaagaaactgactaaggtgagtattgggaaaactttggggtgggattttcagatggacagattgagtaaaaatttgttttttctgtcttgcagctgtcatgagtggaaacgcttcttttaaggggggagtcttcagcccttatctgacagggcgtctcccatcctgggcaggagttcgtcagaatgttatgggatctactgtggatggaagacccgtccaacccgccaattcttcaacgctgacctatgctactttaagttcttcacctttggacgcagctgcagctgccgccgccgcttctgttgccgctaacactgtgcttggaatgggttactatggaagcatcatggctaattccacttcctctaataacccttctaccctgactcaggacaagttacttgtccttttggcccagctggaggctttgacccaacgtctgggtgaactttctcagcaggtggtcgagttgcgagtacaaactgagtctgctgtcggcacggcaaagtctaaataaaaaaatcccagaatcaatgaataaataaacaagcttgttgttgatttaaaatcaagtgtttttatttcatttttcgcgcacggtatgccctagaccaccgatctctatcattgagaactcggtggattttttccaggatcctatagaggtgggattgaatgtttagatacatgggcattaggccgtctttggggtggagatagctccattgaagggattcatgctccggggtagtgttgtaaatcacccagtcataacaaggtcgcagtgcatggtgttgcacaatatcttttagaagtaggctgattgccacagataagcccttggtgtaggtgtttacaaaccggttgagctgggatgggtgcattcggggtgaaattatgtgcattttggattggatttttaagttggcaatattgccgccaagatcccgtcttgggttcatgttatgaaggaccaccaagacggtgtatccggtacatttaggaaatttatcgtgcagcttggatggaaaagcgtggaaaaatttggagacacccttgtgtcctccaagattttccatgcactcatccatgataatagcaatggggccgtgggcagcggcgcgggcaaacacgttccgtgggtctgacacatcatagttatgttcctgagttaaatcatcataagccattttaatgaatttggggcggagagtaccagattggggtatgaatgttccttcgggccccggagcatagttcccctcacagatttgcatttcccaagctttcagttccgagggtggaatcatgtccacctggggggctatgaaaaacaccgtttctggggcgggggtgattaattgtgatgatagcaaatttctgagcaattgagatttgccacatccggtggggccataaatgattccgattacgggttgcaggtggtagtttagggaacggcaactgccgtcttctcgaagcaagggggccacctcgttcatcatttcccttacatgcatattttcccgcaccaaatccattaggaggcgctctcctcctagtgatagaagttcttgtagtgaggaaaagtttttcagcggtttcagaccgtcagccatgggcattttggagagagtttgctgcaaaagttctagtctgttccacagttcagtgatgtgttctatggcatctcgatccagcagacctcctcgtttcgcgggtttggacggctcctggaatagggtatgagacgatgggcgtccagcgctgccagggttcggtccttccagggtctcagtgttcgagtcagggttgtttccgtcacagtgaaggggtgtgcgcctgcttgggcgcttgccagggtgcgcttcagactcatcctgctggtcgaaaacttctgtcgcttggcgccctgtatgtcggccaagtagcagtttaccatgagttcgtagttgagcgcctcggctgcgtggcctttggcgcggagcttacctttggaagttttcttgcataccgggcagtataggcatttcagcgcatacaacttgggcgcaaggaaaacggattctggggagtatgcatctgcgccgcaggaggcgcaaacagtttcacattccaccagccaggttaaatccggttcattggggtcaaaaacaagttttccgccatattttttgatgcgtttcttacctttggtctccatgagttcgtgtcctcgttgagtgacaaacaggctgtccgtgtccccgtagactgattttacaggcctcttctccagtggagtgcctcggtcttcttcgtacaggaactctgaccactctgatacaaaggcgcgcgtccaggccagcacaaaggaggctatgtgggaggggtagcgatcgttgtcaaccagggggtccaccttttccaaagtatgcaaacacatgtcaccctcttcaacatccaggaatgtgattggcttgtaggtgtatttcacgtgacctggggtccccgctgggggggtataaaagggggcggttctttgctcttcctcactgtcttccggatcgctgtccaggaacgtcagctgttggggtaggtattccctctcgaaggcgggcatgacctctgcactcaggttgtcagtttctaagaacgaggaggatttgatattgacagtgccggttgagatgcctttcatgaggttttcgtccatctggtcagaaaacacaatttttttattgtcaagtttggtggcaaatgatccatacagggcgttggataaaagtttggcaatggatcgcatggtttggttcttttccttgtccgcgcgctctttggcggcgatgttgagttggacatactcgcgtgccaggcacttccattcggggaagatagttgttaattcatctggcacgattctcacttgccaccctcgattatgcaaggtaattaaatccacactggtggccacctcgcctcgaaggggttcattggtccaacagagcctacctcctttcctagaacagaaagggggaagtgggtctagcataagttcatcgggagggtctgcatccatggtaaagattcccggaagtaaatccttatcaaaatagctgatgggagtggggtcatctaaggccatttgccattctcgagctgccagtgcgcgctcatatgggttaaggggactgccccatggcatgggatgggtgagtgcagaggcatacatgccacagatgtcatagacgtagatgggatcctcaaagatgcctatgtaggttggatagcatcgcccccctctgatacttgctcgcacatagtcatatagttcatgtgatggcgctagcagccccggacccaagttggtgcgattgggtttttctgttctgtagacgatctggcgaaagatggcgtgagaattggaagagatggtgggtctttgaaaaatgttgaaatgggcatgaggtagacctacagagtctctgacaaagtgggcataagattcttgaagcttggttaccagttcggcggtgacaagtacgtctagggcgcagtagtcaagtgtttcttgaatgatgtcataacctggttggtttttcttttcccacagttcgcggttgagaaggtattcttcgcgatccttccagtactcttctagcggaaacccgtctttgtctgcacggtaagatcctagcatgtagaactgattaactgccttgtaagggcagcagcccttctctacgggtagagagtatgcttgagcagcttttcgtagcgaagcgtgagtaagggcaaaggtgtctctgaccatgactttgaggaattggtatttgaagtcgatgtcgtcacaggctccctgttcccagagttggaagtctacccgtttcttgtaggcggggttgggcaaagcgaaagtaacatcattgaagagaatcttgccggccctgggcatgaaattgcgagtgatgcgaaaaggctgtggtacttccgctcggttattgataacctgggcagctaggacgatctcgtcgaaaccgttgatgttgtgtcctacgatgtataattctatgaaacgcggcgtgcctctgacgtgaggtagcttactgagctcatcaaaggttaggtctgtggggtcagataaggcgtagtgttcgagagcccattcgtgcaggtgaggattcgctttaaggaaggaggaccagaggtccactgccagtgctgtttgtaactggtcccggtactgacgaaaatgccgtccgactgccattttttctggggtgacgcaatagaaggtttgggggtcctgccgccagcgatcccacttgagttttatggcgaggtcataggcgatgttgacgagccgctggtctccagagagtttcatgaccagcatgaaggggattagctgcttgccaaaggaccccatccaggtgtaggtttccacatcgtaggtgagaaagagcctttctgtgcgaggatgagagccaatcgggaagaactggatctcctgccaccagttggaggaatggctgttgatgtgatggaagtagaactccctgcgacgcgccgagcattcatgcttgtgcttgtacagacggccgcagtagtcgcagcgttgcacgggttgtatctcgtgaatgagttgtacctggcttcccttgacgagaaatttcagtgggaagccgaggcctggcgattgtatctcgtgctttactatgttgtctgcatcggcctgttcatcttctgtctcgatggtggtcatgctgacgagccctcgcgggaggcaagtccagacctcggcgcggcaggggcggagctcgaggacgagagcgcgcaggctggagctgtccagggtcctgagacgctgcggactcaggttagtaggcagtgtcaggagattaacttgcatgatcttttggagggcgtgcgggaggttcagatagtacttgatctcaacgggtccgttggtggagatgtcgatggcttgcagggttccgtgtcccttgggcgctaccaccgtgcccttgtttttcattttggacggcggtggctctgttgcttcttgcatgtttagaagcggtgtcgagggcgcgcaccgggcggcaggggcggctcgggacccggcggcatggctggcagtggtacgtcggcgccgcgcgcgggtaggttctggtactgcgccctgagaagactcgcatgcgcgacgacgcggcggttgacatcctggatctgacgcctctgggtgaaagctaccggccccgtgagcttgaacctgaaagagagttcaacagaatcaatctcggtatcgttgacggcggcttgcctaaggatttcttgcacgtcaccagagttgtcctggtaggcgatctccgccatgaactgctcgatctcttcctcttgaagatctccgcggcccgctctctcgacggtggccgcgaggtcgttggagatgcgcccaatgagttgagagaatgcattcatgcccgcctcgttccagacgcggctgtagaccacggcccccacgggatctctcgcgcgcatgaccacctgggcgaggttgagctccacgtggcgggtgaagaccgcatagttgcataggcgctggaaaaggtagttgagtgtggtggcgatgtgctcggtgacgaagaaatacatgatccatcgtctcagcggcatctcgctgacatcgcccagagcttccaagcgctccatggcctcgtagaagtccacggcaaaattaaaaaactgggagtttcgcgcggacacggtcaactcctcttccagaagacggataagttcggcgatggtggtgcgcacctcgcgctcgaaagcccctgggatttcttcctcaatctcttcttcttccactaacatctcttcctcttcaggtggggctgcaggaggagggggaacgcggcgacgccggcggcgcacgggcagacggtcgatgaatctttcaatgacctctccgcggcggcggcgcatggtttcagtgacggcgcggccgttctcgcgcggtcgcagagtaaaaacaccgccgcgcatctccttaaagtggtgactgggaggttctccgtttgggagggagagggcgctgattatacattttattaattggcccgtagggactgcacgcagagatctgatcgtgtcaagatccacgggatctgaaaacctttcgacgaaagcgtctaaccagtcacagtcacaaggtaggctgagtacggcttcttgtgggcgggggtggttatgtgttcggtctgggtcttctgtttcttcttcatctcgggaaggtgagacgatgctgctggtgatgaaattaaagtaggcagttctaagacggcggatggtggcgaggagcaccaggtctttgggtccggcttgctggatacgcaggcgattggccattccccaagcattatcctgacatctagcaagatctttgtagtagtcttgcatgagccgttctacgggcacttcttcctcacccgttctgccatgcatacgtgtgagtccaaatccgcgcattggttgtaccagtgccaagtcagctacgactctttcggcgaggatggcttgctgtacttgggtaagggtggcttgaaagtcatcaaaatccacaaagcggtggtaagctcctgtattaatggtgtaagcacagttggccatgactgaccagttaactgtctggtgaccagggcgcacgagctcggtgtatttaaggcgcgaataggcgcgggtgtcaaagatgtaatcgttgcaggtgcgcaccagatactggtaccctataagaaaatgcggcggtggttggcggtagagaggccatcgttctgtagctggagcgccaggggcgaggtcttccaacataaggcggtgatagccgtagatgtacctggacatccaggtgattcctgcggcggtagtagaagcccgaggaaactcgcgtacgcggttccaaatgttgcgtagcggcatgaagtagttcattgtaggcacggtttgaccagtgaggcgcgcgcagtcattgatgctctatagacacggagaaaatgaaagcgttcagcgactcgactccgtagcctggaggaacgtgaacgggttgggtcgcggtgtaccccggttcgagacttgtactcgagccggccggagccgcggctaacgtggtattggcactcccgtctcgacccagcctacaaaaatccaggatacggaatcgagtcgttttgctggtttccgaatggcagggaagtgagtcctattttttttttttgccgctcagatgcatcccgtgctgcgacagatgcgcccccaacaacagcccccctcgcagcagcagcagcagcaatcacaaaaggctgtccctgcaactactgcaactgccgccgtgagcggtgcgggacagcccgcctatgatctggacttggaagagggcgaaggactggcacgtctaggtgcgccttcacccgagcggcatccgcgagttcaactgaaaaaagattctcgcgaggcgtatgtgccccaacagaacctatttagagacagaagcggcgaggagccggaggagatgcgagcttcccgctttaacgcgggtcgtgagctgcgtcacggtttggaccgaagacgagtgttgcgggacgaggatttcgaagttgatgaaatgacagggatcagtcctgccagggcacacgtggctgcagccaaccttgtatcggcttacgagcagacagtaaaggaagagcgtaacttccaaaagtcttttaataatcatgtgcgaaccctgattgcccgcgaagaagttacccttggtttgatgcatttgtgggatttgatggaagctatcattcagaaccctactagcaaacctctgaccgcccagctgtttctggtggtgcaacacagcagagacaatgaggctttcagagaggcgctgctgaacatcaccgaacccgaggggagatggttgtatgatcttatcaacattctacagagtatcatagtgcaggagcggagcctgggcctggccgagaaggtggctgccatcaattactcggttttgagcttgggaaaatattacgctcgcaaaatctacaagactccatacgttcccatagacaaggaggtgaagatagatgggttctacatgcgcatgacgctcaaggtcttgaccctgagcgatgatcttggggtgtatcgcaatgacagaatgcatcgcgcggttagcgccagcaggaggcgcgagttaagcgacagggaactgatgcacagtttgcaaagagctctgactggagctggaaccgagggtgagaattacttcgacatgggagctgacttgcagtggcagcctagtcgcagggctctgagcgccgcgacggcaggatgtgagcttccttacatagaagaggcggatgaaggcgaggaggaagagggcgagtacttggaagactgatggcacaacccgtgttttttgctagatggaacagcaagcaccggatcccgcaatgcgggcggcgctgcagagccagccgtccggcattaactcctcggacgattggacccaggccatgcaacgtatcatggcgttgacgactcgcaaccccgaagcctttagacagcaaccccaggccaaccgtctatcggccatcatggaagctgtagtgccttcccgctctaatcccactcatgagaaggtcctggccatcgtgaacgcgttggtggagaacaaagctattcgtccagatgaggccggactggtatacaacgctctcttagaacgcgtggctcgctacaacagtagcaatgtgcaaaccaatttggaccgtatgataacagatgtacgcgaagccgtgtctcagcgcgaaaggttccagcgtgatgccaacctgggttcgctggtggcgttaaatgctttcttgagtactcagcctgctaatgtgccgcgtggtcaacaggattatactaactttttaagtgctttgagactgatggtatcagaagtacctcagagcgaagtgtatcagtccggtcctgattacttctttcagactagcagacagggcttgcagacggtaaatctgagccaagcttttaaaaaccttaaaggtttgtggggagtgcatgccccggtaggagaaagagcaaccgtgtctagcttgttaactccgaactcccgcctattattactgttggtagctcctttcaccgacagcggtagcatcgaccgtaattcctatttgggttacctactaaacctgtatcgcgaagccatagggcaaagtcaggtggacgagcagacctatcaagaaattacccaagtcagtcgcgctttgggacaggaagacactggcagtttggaagccactctgaacttcttgcttaccaatcggtctcaaaagatccctcctcaatatgctcttactgcggaggaggagaggatccttagatatgtgcagcagagcgtgggattgtttctgatgcaagagggggcaactccgactgcagcactggacatgacagcgcgaaatatggagcccagcatgtatgccagtaaccgacctttcattaacaaactgctggactacttgcacagagctgccgctatgaactctgattatttcaccaatgccatcttaaacccgcactggctgcccccacctggtttctacacgggcgaatatgacatgcccgaccctaatgacggatttctgtgggacgacgtggacagcgatgttttttcacctctttctgatcatcgcacgtggaaaaaggaaggcggcgatagaatgcattcttctgcatcgctgtccggggtcatgggtgctaccgcggctgagcccgagtctgcaagtccttttcctagtctacccttttctctacacagtgtacgtagcagcgaagtgggtagaataagtcgcccgagtttaatgggcgaagaggagtatctaaacgattccttgctcagaccggcaagagaaaaaaatttcccaaacaatggaatagaaagtttggtggataaaatgagtagatggaagacttatgctcaggatcacagagacgagcctgggatcatggggattacaagtagagcgagccgtagacgccagcgccatgacagacagaggggtcttgtgtgggacgatgaggattcggccgatgatagcagcgtgctggacttgggtgggagaggaaggggcaacccgtttgctcatttgcgccctcgcttgggtggtatgttgtaaaaaaaaataaaaaaaaaactcaccaaggccatggcgacgagcgtacgttcgttcttctttattatctgtgtctagtataatgaggcgagtcgtgctaggcggagcggtggtgtatccggagggtcctcctccttcgtacgagagcgtgatgcagcagcagcaggcgacggcggtgatgcaatccccactggaggctccctttgtgcctccgcgatacctggcacctacggagggcagaaacagcattcgttattcggaactggcacctcagtacgataccaccaggttgtatctggtggacaacaagtcggcggacattgcttctctgaactatcagaatgaccacagcaacttcttgaccacggtggtgcaaaacaatgactttacccctacggaagccagcacccagaccattaactttgatgaacgatcgcggtggggcggtcagctaaagaccatcatgcatactaacatgccaaacgtgaacgagtatatgtttagtaacaagttcaaagcgcgtgtgatggtgtccagaaaacctcccgacggtgctgcagttggggatacttatgatcacaagcaggatattttgaaatatgagtggttcgagtttactttgccagaaggcaacttttcagttactatgactattgatttgatgaacaatgccatcatagataattacttgaaagtgggtagacagaatggagtgcttgaaagtgacattggtgttaagttcgacaccaggaacttcaagctgggatgggatcccgaaaccaagttgatcatgcctggagtgtatacgtatgaagccttccatcctgacattgtcttactgcctggctgcggagtggattttaccgagagtcgtttgagcaaccttcttggtatcagaaaaaaacagccatttcaagagggttttaagattttgtatgaagatttagaaggtggtaatattccggccctcttggatgtagatgcctatgagaacagtaagaaagaacaaaaagccaaaatagaagctgctacagctgctgcagaagctaaggcaaacatagttgccagcgactctacaagggttgctaacgctggagaggtcagaggagacaattttgcgccaacacctgttccgactgcagaatcattattggccgatgtgtctgaaggaacggacgtgaaactcactattcaacctgtagaaaaagatagtaagaatagaagctataatgtgttggaagacaaaatcaacacagcctatcgcagttggtatctttcgtacaattatggcgatcccgaaaaaggagtgcgttcctggacattgctcaccacctcagatgtcacctgcggagcagagcaggtctactggtcgcttccagacatgatgaaggatcctgtcactttccgctccactagacaagtcagtaactaccctgtggtgggtgcagagcttatgcccgtcttctcaaagagcttctacaacgaacaagctgtgtactcccagcagctccgccagtccacctcgcttacgcacgtcttcaaccgctttcctgagaaccagattttaatccgtccgccggcgcccaccattaccaccgtcagtgaaaacgttcctgctctcacagatcacgggaccctgccgttgcgcagcagtatccggggagtccaacgtgtgaccgttactgacgccagacgccgcacctgtccctacgtgtacaaggcactgggcatagtcgcaccgcgcgtcctttcaagccgcactttctaaaaaaaaaaaaaatgtccattcttatctcgcccagtaataacaccggttggggtctgcgcgctccaagcaagatgtacggaggcgcacgcaaacgttctacccaacatcctgtccgtgttcgcggacattttcgcgctccatggggcgccctcaagggccgcactcgcgttcgaaccaccgtcgatgatgtaatcgatcaggtggttgccgacgcccgtaattatactcctactgcgcctacatctactgtggatgcagttattgacagtgtagtggctgacgctcgcaactatgctcgacgtaagagccggcgaaggcgcattgccagacgccaccgagctaccactgccatgcgagccgcaagagctctgctacgaagagctagacgcgtggggcgaagagccatgcttagggcggccagacgtgcagcttcgggcgccagcgccggcaggtcccgcaggcaagcagccgctgtcgcagcggcgactattgccgacatggcccaatcgcgaagaggcaatgtatactgggtgcgtgacgctgccaccggtcaacgtgtacccgtgcgcacccgtccccctcgcacttagaagatactgagcagtctccgatgttgtgtcccagcggcgaggatgtccaagcgcaaatacaaggaagaaatgctgcaggttatcgcacctgaagtctacggccaaccgttgaaggatgaaaaaaaaccccgcaaaatcaagcgggttaaaaaggacaaaaaagaagaggaagatggcgatgatgggctggcggagtttgtgcgcgagtttgccccacggcgacgcgtgcaatggcgtgggcgcaaagttcgacatgtgttgagacctggaacttcggtggtctttacacccggcgagcgttcaagcgctacttttaagcgttcctatgatgaggtgtacggggatgatgatattcttgagcaggcggctgaccgattaggcgagtttgcttatggcaagcgtagtagaataacttccaaggatgagacagtgtcgatacccttggatcatggaaatcccacccctagtcttaaaccggtcactttgcagcaagtgttacccgtaactccgcgaacaggtgttaaacgcgaaggtgaagatttgtatcccactatgcaactgatggtacccaaacgccagaagttggaggacgttttggagaaagtaaaagtggatccagatattcaacctgaggttaaagtgagacccattaagcaggtagcgcctggtctgggggtacaaactgtagacattaagattcccactgaaagtatggaagtgcaaactgaacccgcaaagcctactgccacctccactgaagtgcaaacggatccatggatgcccatgcctattacaactgacgccgccggtcccactcgaagatcccgacgaaagtacggtccagcaagtctgttgatgcccaattatgttgtacacccatctattattcctactcctggttaccgaggcactcgctactatcgcagccgaaacagtacctcccgccgtcgccgcaagacacctgcaaatcgcagtcgtcgccgtagacgcacaagcaaaccgactcccggcgccctggtgcggcaagtgtaccgcaatggtagtgcggaacctttgacactgccgcgtgcgcgttaccatccgagtatcatcacttaatcaatgttgccgctgcctccttgcagatatggccctcacttgtcgccttcgcgttcccatcactggttaccgaggaagaaactcgcgccgtagaagagggatgttgggacgcggaatgcgacgctacaggcgacggcgtgctatccgcaagcaattgcggggtggttttttaccagccttaattccaattatcgctgctgcaattggcgcgataccaggcatagcttccgtggcggttcaggcctcgcaacgacattgacattggaaaaaaacgtataaataaaaaaaaaaaaatacaatggactctgacactcctggtcctgtgactatgttttcttagagatggaagacatcaatttttcatccttggctccgcgacacggcacgaagccgtacatgggcacctggagcgacatcggcacgagccaactgaacgggggcgccttcaattggagcagtatctggagcgggcttaaaaattttggctcaaccataaaaacatacgggaacaaagcttggaacagcagtacaggacaggcgcttagaaataaacttaaagaccagaacttccaacaaaaagtagtcgatgggatagcttccggcatcaatggagtggtagatttggctaaccaggctgtgcagaaaaagataaacagtcgtttggacccgccgccagcaaccccaggtgaaatgcaagtggaggaagaaattcctccgccagaaaaacgaggcgacaagcgtccgcgtcccgatttggaagagacgctggtgacgcgcgtagatgaaccgccttcttatgaggaagcaacgaagcttggaatgcccaccactagaccgatagccccaatggccaccggggtgatgaaaccttctcagttgcatcgacccgtcaccttggatttgccccctccccctgctgctactgctgtacccgcttctaagcctgtcgctgccccgaaaccagtcgccgtagccaggtcacgtcccgggggcgctcctcgtccaaatgcgcactggcaaaatactctgaacagcatcgtgggtctaggcgtgcaaagtgtaaaacgccgtcgctgcttttaattaaatatggagtagcgcttaacttgcctatctgtgtatatgtgtcattacacgccgtcacagcagcagaggaaaaaaggaagaggtcgtgcgtcgacgctgagttactttcaagatggccaccccatcgatgctgccccaatgggcatacatgcacatcgccggacaggatgcttcggagtacctgagtccgggtctggtgcagttcgcccgcgccacagacacctacttcaatctgggaaataagtttagaaatcccaccgtagcgccgacccacgatgtgaccaccgaccgtagccagcggctcatgttgcgcttcgtgcccgttgaccgggaggacaatacatactcttacaaagtgcggtacaccctggccgtgggcgacaacagagtgctggatatggccagcacgttctttgacattaggggtgtgttggacagaggtcccagtttcaaaccctattctggtacggcttacaactccctggctcctaaaggcgctccaaatacatctcagtggattgcagaaggtgtaaaaaatacaactggtgaggaacacgtaacagaagaggaaaccaatactactacttacacttttggcaatgctcctgtaaaagctgaagctgaaattacaaaagaaggactcccagtaggtttggaagtttcagatgaagaaagtaaaccgatttatgctgataaaacatatcagccagaacctcagctgggagatgaaacttggactgaccttgatggaaaaaccgaaaagtatggaggcagggctctcaaacccgatactaagatgaaaccatgctacgggtcctttgccaaacctactaatgtgaaaggcggtcaggcaaaacaaaaaacaacggagcagccaaatcagaaagtcgaatatgatatcgacatggagttttttgatgcggcatcgcagaaaacaaacttaagtcctaaaattgtcatgtatgcagaaaatgtaaatttggaaactccagacactcatgtagtgtacaaacctggaacagaagacacaagttccgaagctaatttgggacaacaatctatgcccaacagacccaactacattggcttcagagataactttattggacttatgtactataacagtactggtaacatgggggtgctggctggtcaagcgtctcagttaaatgcagtggttgacttgcaggacagaaacacagaactttcttaccaactcttgcttgactctctgggcgacagaaccagatactttagcatgtggaatcaggctgtggacagttatgatcctgatgtacgtgttattgaaaatcatggtgtggaagatgaacttcccaactactgttttccactggacggcataggtgttccaacaaccagttacaaatcaatagttccaaatggagacaatgcgcctaattggaaggaacctgaagtaaatggaacaagtgagatcggacagggtaatttgtttgccatggaaattaaccttcaagccaatctatggcgaagtttcctttattccaatgtggctctatatctcccagactcgtacaaatacaccccgtccaatgtcactcttccagaaaacaaaaacacctacgactacatgaacgggcgggtggtgccgccatctctagtagacacctatgtgaacattggtgccaggtggtctctggatgccatggacaatgtcaacccattcaaccaccaccgtaacgctggcttgcgttaccgatccatgcttctgggtaacggacgttatgtgcctttccacatacaagtgcctcaaaaattcttcgctgttaaaaacctgctgcttctcccaggctcctacacttatgagtggaactttaggaaggatgtgaacatggttctacagagttccctcggtaacgacctgcgggtagatggcgccagcatcagtttcacgagcatcaacctctatgctacttttttccccatggctcacaacaccgcttccacccttgaagccatgctgcggaatgacaccaatgatcagtcattcaacgactacctatctgcagctaacatgctctaccccattcctgccaatgcaaccaatattcccatttccattccttctcgcaactgggcggctttcagaggctggtcatttaccagactgaaaaccaaagaaactccctctttggggtctggatttgacccctactttgtctattctggttctattccctacctggatggtaccttctacctgaaccacacttttaagaaggtttccatcatgtttgactcttcagtgagctggcctggaaatgacaggttactatctcctaacgaatttgaaataaagcgcactgtggatggcgaaggctacaacgtagcccaatgcaacatgaccaaagactggttcttggtacagatgctcgccaactacaacatcggctatcagggcttctacattccagaaggatacaaagatcgcatgtattcatttttcagaaacttccagcccatgagcaggcaggtggttgatgaggtcaattacaaagacttcaaggccgtcgccataccctaccaacacaacaactctggctttgtgggttacatggctccgaccatgcgccaaggtcaaccctatcccgctaactatccctatccactcattggaacaactgccgtaaatagtgttacgcagaaaaagttcttgtgtgacagaaccatgtggcgcataccgttctcgagcaacttcatgtctatgggggcccttacagacttgggacagaatatgctctatgccaactcagctcatgctctggacatgacctttgaggtggatcccatggatgagcccaccctgctttatcttctcttcgaagttttcgacgtggtcagagtgcatcagccacaccgcggcatcatcgaggcagtctacctgcgtacaccgttctcggccggtaacgctaccacgtaagaagcttcttgcttcttgcaaatagcagctgcaaccatggcctgcggatcccaaaacggctccagcgagcaagagctcagagccattgtccaagacctgggttgcggaccctattttttgggaacctacgataagcgcttcccggggttcatggcccccgataagctcgcctgtgccattgtaaatacggccggacgtgagacggggggagagcactggttggctttcggttggaacccacgttctaacacctgctacctttttgatccttttggattctcggatgatcgtctcaaacagatttaccagtttgaatatgagggtctcctgcgccgcagcgctcttgctaccaaggaccgctgtattacgctggaaaaatctacccagaccgtgcagggtccccgttctgccgcctgcggacttttctgctgcatgttccttcacgcctttgtgcactggcctgaccgtcccatggacggaaaccccaccatgaaattgctaactggagtgccaaacaacatgcttcattctcctaaagtccagcccaccctgtgtgacaatcaaaaagcactctaccattttcttaatacccattcgccttattttcgctcccatcgtacacacatcgaaagggccactgcgttcgaccgtatggatgttcaataatgactcatgtaaacaacgtgttcaataaacatcactttatttttttacatgtatcaaggctctgcattacttatttatttacaagtcgaatgggttctgacgagaatcagaatgacccgcaggcagtgatacgttgcggaactgatacttgggttgccacttgaattcgggaatcaccaacttgggaaccggtatatcgggcaggatgtcactccacagctttctggtcagctgcaaagctccaagcaggtcaggagccgaaatcttgaaatcacaattaggaccagtgctttgagcgcgagagttgcggtacaccggattgcagcactgaaacaccatcagcgacggatgtctcacgcttgccagcacggtgggatctgcaatcatgcccacatccagatcttcagcattggcaatgctgaacggggtcatcttgcaggtctgcctacccatggcgggcacccaattaggcttgtggttgcaatcgcagtgcagggggatcagtatcatcttggcctgatcctgtctgattcctggatacacggctctcatgaaagcatcatattgcttgaaagcctgctgggctttactaccctcggtataaaacatcccgcaggacctgctcgaaaactggttagctgcacagccggcatcattcacacagcagcgggcgtcattgttagctatttgcaccacacttctgccccagcggttttgggtgattttggttcgctcgggattctcctttaaggctcgttgtccgttctcgctggccacatccatctcgataatctgctccttctgaatcataatattgccatgcaggcacttcagcttgccctcataatcattgcagccatgaggccacaacgcacagcctgtacattcccaattatggtgggcgatctgagaaaaagaatgtatcattccctgcagaaatcttcccatcatcgtgctcagtgtcttgtgactagtgaaagttaactggatgcctcggtgctcctcgtttacgtactggtgacagatgcgcttgtattgttcgtgttgctcaggcattagtttaaaagaggttctaagttcgttatccagcctgtacttctccatcagcagacacatcacttccatgcctttctcccaagcagacaccaggggcaagctaatcggattcttaacagtgcaggcagcagctcctttagccagagggtcatctttagcgatcttctcaatgcttcttttgccatccttctcaacgatgcgcacgggcgggtagctgaaacccactgctacaagttgcgcctcttctctttcttcttcgctgtcttgactgatgtcttgcatggggatatgtttggtcttccttggcttctttttggggggtatcggaggaggaggactgtcgctccgttccggagacagggaggattgtgacgtttcgctcaccattaccaactgactgtcggtagaagaacctgaccccacacggcgacaggtgtttctcttcgggggcagaggtggaggcgattgcgaagggctgcggtccgacctggaaggcggatgactggcagaaccccttccgcgttcgggggtgtgctccctgtggcggtcgcttaactgatttccttcgcggctggccattgtgttctcctaggcagagaaacaacagacatggaaactcagccattgctgtcaacatcgccacgagtgccatcacatctcgtcctcagcgacgaggaaaaggagcagagcttaagcattccaccgcccagtcctgccaccacctctaccctagaagataaggaggtcgacgcatctcatgacatgcagaataaaaaagcgaaagagtctgagacagacatcgagcaagacccgggctatgtgacaccggtggaacacgaggaagagttgaaacgctttctagagagagaggatgaaaactgcccaaaacaacgagcagataactatcaccaagatgctggaaatagggatcagaacaccgactacctcatagggcttgacggggaagacgcgctccttaaacatctagcaagacagtcgctcatagtcaaggatgcattattggacagaactgaagtgcccatcagtgtggaagagctcagccgcgcctacgagcttaacctcttttcacctcgtactccccccaaacgtcagccaaacggcacctgcgagccaaatcctcgcttaaacttttatccagcttttgctgtgccagaagtactggctacctatcacatcttttttaaaaatcaaaaaattccagtctcctgccgcgctaatcgcacccgcgccgatgccctactcaatctgggacctggttcacgcttacctgatatagcttccttggaagaggttccaaagatcttcgagggtctgggcaataatgagactcgggccgcaaatgctctgcaaaagggagaaaatggcatggatgagcatcacagcgttctggtggaattggaaggcgataatgccagactcgcagtactcaagcgaagcatcgaggtcacacacttcgcatatcccgctgtcaacctgccccctaaagtcatgacggcggtcatggaccagttactcattaagcgcgcaagtcccctttcagaagacatgcatgacccagatgcctgtgatgagggtaaaccagtggtcagtgatgagcagctaacccgatggctgggcaccgactctcccagggatttggaagagcgtcgcaagcttatgatggccgtggtgctggttaccgtagaactagagtgtctccgacgtttctttaccgattcagaaaccttgcgcaaactcgaagagaatctgcactacacttttagacacggctttgtgcggcaggcatgcaagatatctaacgtggaactcaccaacctggtttcctacatgggtattctgcatgagaatcgcctaggacaaagcgtgctgcacagcaccctgaagggggaagcccgccgtgattacatccgcgattgtgtctatctgtacctgtgccacacgtggcaaaccggcatgggtgtatggcagcaatgtttagaagaacagaacttgaaagagcttgacaagctcttacagaaatctcttaaggttctgtggacagggttcgacgagcgcaccgtcgcttccgacctggcagacctcatcttcccagagcgtctcagggttactttgcgaaacggattgcctgactttatgagccagagcatgcttaacaattttcgctctttcatcctggaacgctccggtatcctgcccgccacctgctgcgcactgccctccgactttgtgcctctcacctaccgcgagtgccccccgccgctatggagtcactgctacctgttccgtctggccaactatctctcctaccactcggatgtgatcgaggatgtgagcggagacggcttgctggagtgtcactgccgctgcaatctgtgcacgccccaccggtccctagcttgcaacccccagttgatgagcgaaacccagataataggcacctttgaattgcaaggccccagcagccaaggcgatgggtcttctcctgggcaaagtttaaaactgaccccgggactgtggacctccgcctacttgcgcaagtttgctccggaagattaccacccctatgaaatcaagttctatgaggaccaatcacagcctccaaaggccgaactttcggcctgcgtcatcacccagggggcaattctggcccaattgcaagccatccaaaaatcccgccaagaatttctactgaaaaagggtaagggggtctaccttgacccccagaccggcgaggaactcaacacaaggttccctcaggatgtcccaacgacgagaaaacaagaagttgaaggtgcagccgccgcccccagaagatatggaggaagattgggacagtcaggcagaggaggcggaggaggacagtctggaggacagtctggaggaagacagtttggaggaggaaaacgaggaggcagaggaggtggaagaagtaaccgccgacaaacagttatcctcggctgcggagacaagcaacagcgctaccatctccgctccgagtcgaggaacccggcggcgtcccagcagtagatgggacgagaccggacgcttcccgaacccaaccagcgcttccaagaccggtaagaaggatcggcagggatacaagtcctggcgggggcataagaatgccatcatctcctgcttgcatgagtgcgggggcaacatatccttcacgcggcgctacttgctattccaccatggggtgaactttccgcgcaatgttttgcattactaccgtcacctccacagcccctactatagccagcaaatcccggcagtctcgacagataaagacagcggcggcgacctccaacagaaaaccagcagcggcagttagaaaatacacaacaagtgcagcaacaggaggattaaagattacagccaacgagccagcgcaaacccgagagttaagaaatcggatctttccaaccctgtatgccatcttccagcagagtcggggtcaagagcaggaactgaaaataaaaaaccgatctctgcgttcgctcaccagaagttgtttgtatcacaagagcgaagatcaacttcagcgcactctcgaggacgccgaggctctcttcaacaagtactgcgcgctgactcttaaagagtaggcagcgaccgcgcttattcaaaaaaggcgggaattacatcatcctcgacatgagtaaagaaattcccacgccttacatgtggagttatcaaccccaaatgggattggcggcaggcgcctcccaggactactccacccgcatgaattggctcagcgccgggccttctatgatttctcgagttaatgatatacgcgcctaccgaaaccaaatacttttggaacagtcagctcttaccaccacgccccgccaacaccttaatcccagaaattggcccgccgccctagtgtaccaggaaagtcccgctcccaccactgtattacttcctcgagacgcccaggccgaagtccaaatgactaatgcaggtgcgcagttagctggcggctccaccctatgtcgtcacaggcctcggcataatataaaacgcctgatgatcagaggccgaggtatccagctcaacgacgagtcggtgagctctccgcttggtctacgaccagacggaatctttcagattgccggctgcgggagatcttccttcacccctcgtcaggctgttctgactttggaaagttcgtcttcgcaaccccgctcgggcggaatcgggaccgttcaatttgtggaggagtttactccctctgtctacttcaaccccttctccggatctcctgggcattacccggacgagttcataccgaacttcgacgcgattagcgagtcagtggacggctacgattgatgtctggtgacgcggctgagctatctcggctgcgacatctagaccactgccgccgctttcgctgctttgcccgggaactcattgagttcatctacttcgaactccccaaggatcaccctcaaggtccggcccacggagtgcggatttctatcgaaggcaaaatagactctcgcctgcaacgaattttctcccagcggcccgtgctgatcgagcgagaccagggaaacaccacggtttccatctactgcatttgtaatcaccccggattgcatgaaagcctttgctgtcttatgtgtactgagtttaataaaaactgaattaagactctcctacggactgccgcttcttcaacccggattttacaaccagaagaacgaaacttttcctgtcgtccaggactctgttaacttcacctttcctactcacaaactagaagctcaacgactacaccgcttttccagaagcattttccctactaatactactttcaaaaccggaggtgagctccaaggtcttcctacagaaaacccttgggtggaagcgggccttgtagtgctaggaattcttgcgggtgggcttgtgattattctttgctacctatacacaccttgcttcactttcttagtggtgttgtggtattggtttaaaaaatggggcccatactagtcttgcttgttttactttcgcttttggaaccgggttctgccaattacgatccatgtctagacttcgacccagaaaactgcacacttacttttgcacccgacacaagccgcatctgtggagttcatcgcctctcttacgaacttggcccccaacgacaaaaatttacctgcatggtgggaatcaaccccatagttatcacccagcaaagtggagatactaagggttgcattcactgctcctgcgattccatcgagtgcacctacaccctgctgaagaccctatgcggcctaagagacctgctaccaatgaattaaaaaatgattaataaaaaatcacttacttgaaatcagcaataaggtctctgttgaaattttctcccagcagcacctcacttccctcttcccaactctggtattctaaaccccgttcagcggcatactttctccatactttaaaggggatgtcaaattttagctcctctcctgtacccacaatcttcatgtctttcttcccagatgaccaagagagtccggctcagtgactccttcaaccctgtctacccctatgaagatgaaagcacctcccaacacccctttataaacccagggtttatttccccaaatggcttcacacaaagcccaaacggagttcttactttaaaatgtttaaccccactaacaaccacaggcggatctctacagctaaaagtgggagggggacttacagtggatgacaccaacggttttttgaaagaaaacataagtgccaccacaccactcgttaagactggtcactctataggtttaccactaggagccggattgggaacgaatgaaaataaactttgtatcaaattaggacaaggacttacattcaattcaaacaacatttgcattgatgacaatattaacaccttatggacaggagtcaaccccaccgaagccaactgtcaaatcatgaactccagtgaatctaatgattgcaaattaattctaacactagttaaaactggagcactagtcactgcatttgtttatgttataggagtatctaacaattttaatatgctaactacacacagaaatataaattttactgcagagctgtttttcgattctactggtaatttactaactagactctcatccctcaaaactccacttaatcataaatcaggacaaaacatggctactggtgccattactaatgctaaaggtttcatgcccagcacgactgcctatcctttcaatgataattctagagaaaaagaaaactacatttacggaacttgttactacacagctagtgatcgcactgcttttcccattgacatatctgtcatgcttaaccgaagagcaataaatgacgagacatcatattgtattcgtataacttggtcctggaacacaggagatgccccagaggtgcaaacctctgctacaaccctagtcacctccccatttaccttttactacatcagagaagacgactgacaaataaagtttgcgatcgcggctcccgccagatctctaccgggtaggggaggcgcttttcccaaggcagtctggagcatgcgctttagcagccccgctgggcacttggcgctacacaagtggcctctggcctcgcacacattccacatccaccggtaggcgccaaccggctccgttctttggtggccccttcgcgccaccttctacccctcccctagtcaggaagttcccccccgccccgcagctcgcgtcatgcaggacgtgacaaatggaagtagcacgtctcactagtctcgtgcaaatggacagcaccgctgagcaatggaagcgggtaggcccttggggcagcggccaatagcagctttgctccttcgctttctgggctcagaggctgggaaggggtgggtccgggggcgggctcaggggcgggctcaggggcggggcgggcgcccgaaggtcctccggaggcccggcattccgcacgcttcaaaagcgcacgtctgccgcgctgttctcttcttcctcatctccgggcctttcgagatctttgtcgatcctaccatccactcgacacacccgccagcggccgctgccaagcttccgagctctcgaattcaaaggaggtaccaccatgcaggccgaaggccggggcacagggggttcgacgggcgatgctgatggcccaggaggccctggcattcctgatggcccagggggcaatgctggcggcccaggagaggcgggtgccacgggcggcagaggtccccggggcgcaggggcagcaagggcctcggggccgggaggaggcgccccgcggggtccgcatggcggcgcggcttcagggctgaatggatgctgcagatgcggggccagggggccggagagccgcctgcttgagttctacctcgccatgcctttcgcgacacccatggaagcagagctggcccgcaggagcctggcccaggatgccccaccgcttcccgtgccaggggtgcttctgaaggagttcactgtgtccggcaacatactgactatccgactgactgctgcagaccaccgccaactgcagctctccatcagctcctgtctccagcagctttccctgttgatgtggatcacgcagtgctttctgcccgtgtttttggctcagcctccctcagggcagaggcgctaagctagcttgactgactgagatacagcgtaccttcagctcacagacatgataagatacattgatgagtttggacaaaccacaactagaatgcagtgaaaaaaatgctttatttgtgaaatttgtgatgctattgctttatttgtaaccattataagctgcaataaacaagttaacaacaacaattgcattcattttatgtttcaggttcagggggaggtgtgggaggttttttaaagcaagtaaaacctctacaaatgtggtagtcgtcagctatcctgcaggaacttgtttatttgaaaatcaattcacaaaatccgagtagttattttgcctcccccttcccatttaacagaatacaccaatctctccccacgcacagctttaaacatttggataccattagatatagacatggttttagattccacattccaaacagtttcagagcgagccaatctggggtcagtgatagataaaaatccatcgggatagtcttttaaagcgctttcacagtccaactgctgcggatgcgactccggagtctggatcacggtcatctggaagaagaacgatgggaatcataatccgaaaacggtatcggacgattgtgtctcatcaaacccacaagcagccgctgtctgcgtcgctccgtgcgactgctgtttatgggatcagggtccacagtgtcctgaagcatgattttaatagcccttaacatcaactttctggtgcgatgcgcgcagcaacgcattctgatttcactcaaatctttgcagtaggtacaacacattattacaatattgtttaataaaccataattaaaagcgctccagccaaaactcatatctgatataatcgcccctgcatgaccatcataccaaagtttaatataaattaaatgacgttccctcaaaaacacactacccacatacatgatctcttttggcatgtgcatattaacaatctgtctgtaccatggacaacgttggttaatcatgcaacccaatataaccttccggaaccacactgccaacaccgctcccccagccatgcattgaagtgaaccctgctgattacaatgacaatgaagaacccaattctctcgaccgtgaatcacttgagaatgaaaaatatctatagtggcacaacatagacataaatgcatgcatcttctcataatttttaactcctcaggatttagaaacatatcccagggaataggaagctcttgcagaacagtaaagctggcagaacaaggaagaccacgaacacaacttacactatgcatagtcatagtatcacaatctggcaacagcgggtggtcttcagtcatagaagctcgggtttcattttcctcacaacgtggtaactgggctctggtgtaagggtgatgtctggcgcatgatgtcgagcgtgcgcgcaaccttgtcataatggagttgcttcctgacattctcgtattttgtatagcaaaacgcggccctggcagaacacactcttcttcgccttctatcctgccgcttagcgtgttccgtgtgatagttcaagtacaaccacactcttaagttggtcaaaagaatgctggcttcagttgtaatcaaaactccatcgcatctaatcgttctgaggaaatcatccaagcaatgcaactggattgtgtttcaagcaggagaggagagggaagagacggaagaaccatgttaatttttattccaaacgatctcgcagtacttcaaattgtagatcgcgcagatggcatctctcgcccccactgtgttggtgaaaaagcacagctagatcaaaagaaatgcgattttcaaggtgctcaacggtggcttccagcaaagcctccacgcgcacatccaagaacaaaagaataccaaaagaaggagcattttctaactcctcaatcatcatattacattcctgcaccattcccagataattttcagctttccagccttgaattattcgtgtcagttcttgtggtaaatccaatccacacattacaaacaggtcccggagggcgccctccaccaccattcttaaacacaccctcataatgacaaaatatcttgctcctgtgtcacctgtagcgaattgagaatggcaacatcaattgacatgcccttggctctaagttcttctttaagttctagttgtaaaaactctctcatattatcaccaaactgcttagccagaagccccccgggaacaagagcaggggacgctacagtgcagtacaagcgcagacctccccaattggctccagcaaaaacaagattggaataagcatattgggaaccgccagtaatatcatcgaagttgctggaaatataatcaggcagagtttcttgtaaaaattgaataaaagaaaaatttgccaaaaaaacattcaaaacctctgggatgcaaatgcaataggttaccgcgctgcgctccaacattgttagttttgaattagtctgcaaaaataaaaaaaaaaacaagcgtcatatcatagtagcctgacgaacagatggataaatcagtctttccatcacaagacaagccacagggtctccagctcgaccctcgtaaaacctgtcatcatgattaaacaacagcaccgaaagttcctcgcggtgaccagcatgaataattcttgatgaagcatacaatccagacatgttagcatcagttaacgagaaaaaacagccaacatagcctttgggtataattatgcttaatcgtaagtatagcaaagccacccctcgcggatacaaagtaaaaggcacaggagaataaaaaatataattatttctctgctgctgttcaggcaacgtcgcccccggtccctctaaatacacatacaaagcctcatcagccatggcttaccagacaaagtacagcgggcacacaaagcacaagctctaaagtgactctccaacctctccacaatatatatatacacaagccctaaactgacgtaatgggagtaaagtgtaaaaaatcccgccaaacccaacacacaccccgaaactgcgtcaccagggaaaagtacagtttcacttccgcaatcccaacaggcgtaacttcctctttctcacggtacgtgatatcccactaacttgcaacgtcattttcccacggtcgcaccgccccttttagccgttaaccccacagccaatcaccacacgatccacactttttaaaatcacctcatttacatattggcaccattccatctataaggtatattatatagataga

SEQ ID NO: 57 - DNA, 33843 bp, Artificial Sequence
  NG-217 virus genome sequence consisting of a transgene cassette that encodes the tumour associated antigen, NY-ESO-1, inserted in the region BY
tctatctatataatataccttatagatggaatggtgccaatatgtaaatgaggtgattttaaaaagtgtggatcgtgtggtgattggctgtggggttaacggctaaaaggggcggtgcgaccgtgggaaaatgacgttttgtgggggtggagtttttttgcaagttgtcgcgggaaatgtgacgcataaaaaggcttttttctcacggaactacttagttttcccacggtatttaacaggaaatgaggtagttttgaccggatgcaagtgaaaattgttgattttcgcgcgaaaactgaatgaggaagtgtttttctgaataatgtggtatttatggcagggtggagtatttgttcagggccaggtagactttgacccattacgtggaggtttcgattaccgtgttttttacctgaatttccgcgtaccgtgtcaaagtcttctgtttttacgtaggtgtcagctgatcgctagggtatttatacctcagggtttgtgtcaagaggccactcttgagtgccagcgagaagagttttctcctctgcgccggcagtttaataataaaaaaatgagagatttgcgatttctgcctcaggaaataatctctgctgagactggaaatgaaatattggagcttgtggtgcacgccctgatgggagacgatccggagccacctgtgcagctttttgagcctcctacgcttcaggaactgtatgatttagaggtagagggatcggaggattctaatgaggaagctgtaaatggcttttttaccgattctatgcttttagctgctaatgaagggttagaattagatccgcctttggacacttttgatactccaggggtaattgtggaaagcggtacaggtgtaagaaaattacctgatttgagttccgtggactgtgatttgcactgctatgaagacgggtttcctccgagtgatgaggaggaccatgaaaaggagcagtccatgcagactgcagcgggtgagggagtgaaggctgccaatgttggttttcagttggattgcccggagcttcctggacatggctgtaagtcttgtgaatttcacaggaaaaatactggagtaaaggaactgttatgttcgctttgttatatgagaacgcactgccactttatttacagtaagtgtgtttaagttaaaatttaaaggaatatgctgtttttcacatgtatattgagtgtgagttttgtgcttcttattataggtcctgtgtctgatgctgatgaatcaccatctcctgattctactacctcacctcctgagattcaagcacctgttcctgtggacgtgcgcaagcccattcctgtgaagcttaagcctgggaaacgtccagcagtggaaaaacttgaggacttgttacagggtggggacggacctttggacttgagtacacggaaacgtccaagacaataagtgttccatatccgtgtttacttaaggtgacgtcaatatttgtgtgacagtgcaatgtaataaaaatatgttaactgttcactggtttttattgctttttgggcggggactcaggtatataagtagaagcagacctgtgtggttagctcataggagctggctttcatccatggaggtttgggccattttggaagaccttaggaagactaggcaactgttagagaacgcttcggacggagtctccggtttttggagattctggttcgctagtgaattagctagggtagtttttaggataaaacaggactataaacaagaatttgaaaagttgttggtagattgcccaggactttttgaagctcttaatttgggccatcaggttcactttaaagaaaaagttttatcagttttagacttttcaaccccaggtagaactgctgctgctgtggcttttcttacttttatattagataaatggatcccgcagactcatttcagcaggggatacgttttggatttcatagccacagcattgtggagaacatggaaggttcgcaagatgaggacaatcttaggttactggccagtgcagcctttgggtgtagcgggaatcctgaggcatccaccggtcatgccagcggttctggaggaggaacagcaagaggacaacccgagagccggcctggaccctccagtggaggaggcggagtagctgacttgtctcctgaactgcaacgggtgcttactggatctacgtccactggacgggataggggcgttaagagggagagggcatctagtggtactgatgctagatctgagttggctttaagtttaatgagtcgcagacgtcctgaaaccatttggtggcatgaggttcagaaagagggaagggatgaagtttctgtattgcaggagaaatattcactggaacaggtgaaaacatgttggttggagcctgaggatgattgggaggtggccattaaaaattatgccaagatagctttgaggcctgataaacagtataagattactagacggattaatatccggaatgcttgttacatatctggaaatggggctgaggtggtaatagatactcaagacaaggcagttattagatgctgcatgatggatatgtggcctggggtagtcggtatggaagcagtaacttttgtaaatgttaagtttaggggagatggttataatggaatagtgtttatggccaataccaaacttatattgcatggttgtagcttttttggtttcaacaatacctgtgtagatgcctggggacaggttagtgtacggggatgtagtttctatgcgtgttggattgccacagctggcagaaccaagagtcaattgtctctgaagaaatgcatatttcaaagatgtaacctgggcattctgaatgaaggcgaagcaagggtccgccactgcgcttctacagatactggatgttttattttgattaagggaaatgccagcgtaaagcataacatgatttgcggtgcttccgatgagaggccttatcaaatgctcacttgtgctggtgggcattgtaatatgctggctactgtgcatattgtttcccatcaacgcaaaaaatggcctgtttttgatcacaatgtgatgacgaagtgtaccatgcatgcaggtgggcgtagaggaatgtttatgccttaccagtgtaacatgaatcatgtgaaagtgttgttggaaccagatgccttttccagaatgagcctaacaggaatttttgacatgaacatgcaaatctggaagatcctgaggtatgatgatacgagatcgagggtacgcgcatgcgaatgcggaggcaagcatgccaggttccagccggtgtgtgtagatgtgactgaagatctcagaccggatcatttggttattgcccgcactggagcagagttcggatccagtggagaagaaactgactaaggtgagtattgggaaaactttggggtgggattttcagatggacagattgagtaaaaatttgttttttctgtcttgcagctgtcatgagtggaaacgcttcttttaaggggggagtcttcagcccttatctgacagggcgtctcccatcctgggcaggagttcgtcagaatgttatgggatctactgtggatggaagacccgtccaacccgccaattcttcaacgctgacctatgctactttaagttcttcacctttggacgcagctgcagctgccgccgccgcttctgttgccgctaacactgtgcttggaatgggttactatggaagcatcatggctaattccacttcctctaataacccttctaccctgactcaggacaagttacttgtccttttggcccagctggaggctttgacccaacgtctgggtgaactttctcagcaggtggtcgagttgcgagtacaaactgagtctgctgtcggcacggcaaagtctaaataaaaaaatcccagaatcaatgaataaataaacaagcttgttgttgatttaaaatcaagtgtttttatttcatttttcgcgcacggtatgccctagaccaccgatctctatcattgagaactcggtggattttttccaggatcctatagaggtgggattgaatgtttagatacatgggcattaggccgtctttggggtggagatagctccattgaagggattcatgctccggggtagtgttgtaaatcacccagtcataacaaggtcgcagtgcatggtgttgcacaatatcttttagaagtaggctgattgccacagataagcccttggtgtaggtgtttacaaaccggttgagctgggatgggtgcattcggggtgaaattatgtgcattttggattggatttttaagttggcaatattgccgccaagatcccgtcttgggttcatgttatgaaggaccaccaagacggtgtatccggtacatttaggaaatttatcgtgcagcttggatggaaaagcgtggaaaaatttggagacacccttgtgtcctccaagattttccatgcactcatccatgataatagcaatggggccgtgggcagcggcgcgggcaaacacgttccgtgggtctgacacatcatagttatgttcctgagttaaatcatcataagccattttaatgaatttggggcggagagtaccagattggggtatgaatgttccttcgggccccggagcatagttcccctcacagatttgcatttcccaagctttcagttccgagggtggaatcatgtccacctggggggctatgaaaaacaccgtttctggggcgggggtgattaattgtgatgatagcaaatttctgagcaattgagatttgccacatccggtggggccataaatgattccgattacgggttgcaggtggtagtttagggaacggcaactgccgtcttctcgaagcaagggggccacctcgttcatcatttcccttacatgcatattttcccgcaccaaatccattaggaggcgctctcctcctagtgatagaagttcttgtagtgaggaaaagtttttcagcggtttcagaccgtcagccatgggcattttggagagagtttgctgcaaaagttctagtctgttccacagttcagtgatgtgttctatggcatctcgatccagcagacctcctcgtttcgcgggtttggacggctcctggaatagggtatgagacgatgggcgtccagcgctgccagggttcggtccttccagggtctcagtgttcgagtcagggttgtttccgtcacagtgaaggggtgtgcgcctgcttgggcgcttgccagggtgcgcttcagactcatcctgctggtcgaaaacttctgtcgcttggcgccctgtatgtcggccaagtagcagtttaccatgagttcgtagttgagcgcctcggctgcgtggcctttggcgcggagcttacctttggaagttttcttgcataccgggcagtataggcatttcagcgcatacaacttgggcgcaaggaaaacggattctggggagtatgcatctgcgccgcaggaggcgcaaacagtttcacattccaccagccaggttaaatccggttcattggggtcaaaaacaagttttccgccatattttttgatgcgtttcttacctttggtctccatgagttcgtgtcctcgttgagtgacaaacaggctgtccgtgtccccgtagactgattttacaggcctcttctccagtggagtgcctcggtcttcttcgtacaggaactctgaccactctgatacaaaggcgcgcgtccaggccagcacaaaggaggctatgtgggaggggtagcgatcgttgtcaaccagggggtccaccttttccaaagtatgcaaacacatgtcaccctcttcaacatccaggaatgtgattggcttgtaggtgtatttcacgtgacctggggtccccgctgggggggtataaaagggggcggttctttgctcttcctcactgtcttccggatcgctgtccaggaacgtcagctgttggggtaggtattccctctcgaaggcgggcatgacctctgcactcaggttgtcagtttctaagaacgaggaggatttgatattgacagtgccggttgagatgcctttcatgaggttttcgtccatctggtcagaaaacacaatttttttattgtcaagtttggtggcaaatgatccatacagggcgttggataaaagtttggcaatggatcgcatggtttggttcttttccttgtccgcgcgctctttggcggcgatgttgagttggacatactcgcgtgccaggcacttccattcggggaagatagttgttaattcatctggcacgattctcacttgccaccctcgattatgcaaggtaattaaatccacactggtggccacctcgcctcgaaggggttcattggtccaacagagcctacctcctttcctagaacagaaagggggaagtgggtctagcataagttcatcgggagggtctgcatccatggtaaagattcccggaagtaaatccttatcaaaatagctgatgggagtggggtcatctaaggccatttgccattctcgagctgccagtgcgcgctcatatgggttaaggggactgccccatggcatgggatgggtgagtgcagaggcatacatgccacagatgtcatagacgtagatgggatcctcaaagatgcctatgtaggttggatagcatcgcccccctctgatacttgctcgcacatagtcatatagttcatgtgatggcgctagcagccccggacccaagttggtgcgattgggtttttctgttctgtagacgatctggcgaaagatggcgtgagaattggaagagatggtgggtctttgaaaaatgttgaaatgggcatgaggtagacctacagagtctctgacaaagtgggcataagattcttgaagcttggttaccagttcggcggtgacaagtacgtctagggcgcagtagtcaagtgtttcttgaatgatgtcataacctggttggtttttcttttcccacagttcgcggttgagaaggtattcttcgcgatccttccagtactcttctagcggaaacccgtctttgtctgcacggtaagatcctagcatgtagaactgattaactgccttgtaagggcagcagcccttctctacgggtagagagtatgcttgagcagcttttcgtagcgaagcgtgagtaagggcaaaggtgtctctgaccatgactttgaggaattggtatttgaagtcgatgtcgtcacaggctccctgttcccagagttggaagtctacccgtttcttgtaggcggggttgggcaaagcgaaagtaacatcattgaagagaatcttgccggccctgggcatgaaattgcgagtgatgcgaaaaggctgtggtacttccgctcggttattgataacctgggcagctaggacgatctcgtcgaaaccgttgatgttgtgtcctacgatgtataattctatgaaacgcggcgtgcctctgacgtgaggtagcttactgagctcatcaaaggttaggtctgtggggtcagataaggcgtagtgttcgagagcccattcgtgcaggtgaggattcgctttaaggaaggaggaccagaggtccactgccagtgctgtttgtaactggtcccggtactgacgaaaatgccgtccgactgccattttttctggggtgacgcaatagaaggtttgggggtcctgccgccagcgatcccacttgagttttatggcgaggtcataggcgatgttgacgagccgctggtctccagagagtttcatgaccagcatgaaggggattagctgcttgccaaaggaccccatccaggtgtaggtttccacatcgtaggtgagaaagagcctttctgtgcgaggatgagagccaatcgggaagaactggatctcctgccaccagttggaggaatggctgttgatgtgatggaagtagaactccctgcgacgcgccgagcattcatgcttgtgcttgtacagacggccgcagtagtcgcagcgttgcacgggttgtatctcgtgaatgagttgtacctggcttcccttgacgagaaatttcagtgggaagccgaggcctggcgattgtatctcgtgctttactatgttgtctgcatcggcctgttcatcttctgtctcgatggtggtcatgctgacgagccctcgcgggaggcaagtccagacctcggcgcggcaggggcggagctcgaggacgagagcgcgcaggctggagctgtccagggtcctgagacgctgcggactcaggttagtaggcagtgtcaggagattaacttgcatgatcttttggagggcgtgcgggaggttcagatagtacttgatctcaacgggtccgttggtggagatgtcgatggcttgcagggttccgtgtcccttgggcgctaccaccgtgcccttgtttttcattttggacggcggtggctctgttgcttcttgcatgtttagaagcggtgtcgagggcgcgcaccgggcggcaggggcggctcgggacccggcggcatggctggcagtggtacgtcggcgccgcgcgcgggtaggttctggtactgcgccctgagaagactcgcatgcgcgacgacgcggcggttgacatcctggatctgacgcctctgggtgaaagctaccggccccgtgagcttgaacctgaaagagagttcaacagaatcaatctcggtatcgttgacggcggcttgcctaaggatttcttgcacgtcaccagagttgtcctggtaggcgatctccgccatgaactgctcgatctcttcctcttgaagatctccgcggcccgctctctcgacggtggccgcgaggtcgttggagatgcgcccaatgagttgagagaatgcattcatgcccgcctcgttccagacgcggctgtagaccacggcccccacgggatctctcgcgcgcatgaccacctgggcgaggttgagctccacgtggcgggtgaagaccgcatagttgcataggcgctggaaaaggtagttgagtgtggtggcgatgtgctcggtgacgaagaaatacatgatccatcgtctcagcggcatctcgctgacatcgcccagagcttccaagcgctccatggcctcgtagaagtccacggcaaaattaaaaaactgggagtttcgcgcggacacggtcaactcctcttccagaagacggataagttcggcgatggtggtgcgcacctcgcgctcgaaagcccctgggatttcttcctcaatctcttcttcttccactaacatctcttcctcttcaggtggggctgcaggaggagggggaacgcggcgacgccggcggcgcacgggcagacggtcgatgaatctttcaatgacctctccgcggcggcggcgcatggtttcagtgacggcgcggccgttctcgcgcggtcgcagagtaaaaacaccgccgcgcatctccttaaagtggtgactgggaggttctccgtttgggagggagagggcgctgattatacattttattaattggcccgtagggactgcacgcagagatctgatcgtgtcaagatccacgggatctgaaaacctttcgacgaaagcgtctaaccagtcacagtcacaaggtaggctgagtacggcttcttgtgggcgggggtggttatgtgttcggtctgggtcttctgtttcttcttcatctcgggaaggtgagacgatgctgctggtgatgaaattaaagtaggcagttctaagacggcggatggtggcgaggagcaccaggtctttgggtccggcttgctggatacgcaggcgattggccattccccaagcattatcctgacatctagcaagatctttgtagtagtcttgcatgagccgttctacgggcacttcttcctcacccgttctgccatgcatacgtgtgagtccaaatccgcgcattggttgtaccagtgccaagtcagctacgactctttcggcgaggatggcttgctgtacttgggtaagggtggcttgaaagtcatcaaaatccacaaagcggtggtaagctcctgtattaatggtgtaagcacagttggccatgactgaccagttaactgtctggtgaccagggcgcacgagctcggtgtatttaaggcgcgaataggcgcgggtgtcaaagatgtaatcgttgcaggtgcgcaccagatactggtaccctataagaaaatgcggcggtggttggcggtagagaggccatcgttctgtagctggagcgccaggggcgaggtcttccaacataaggcggtgatagccgtagatgtacctggacatccaggtgattcctgcggcggtagtagaagcccgaggaaactcgcgtacgcggttccaaatgttgcgtagcggcatgaagtagttcattgtaggcacggtttgaccagtgaggcgcgcgcagtcattgatgctctatagacacggagaaaatgaaagcgttcagcgactcgactccgtagcctggaggaacgtgaacgggttgggtcgcggtgtaccccggttcgagacttgtactcgagccggccggagccgcggctaacgtggtattggcactcccgtctcgacccagcctacaaaaatccaggatacggaatcgagtcgttttgctggtttccgaatggcagggaagtgagtcctattttttttttttgccgctcagatgcatcccgtgctgcgacagatgcgcccccaacaacagcccccctcgcagcagcagcagcagcaatcacaaaaggctgtccctgcaactactgcaactgccgccgtgagcggtgcgggacagcccgcctatgatctggacttggaagagggcgaaggactggcacgtctaggtgcgccttcacccgagcggcatccgcgagttcaactgaaaaaagattctcgcgaggcgtatgtgccccaacagaacctatttagagacagaagcggcgaggagccggaggagatgcgagcttcccgctttaacgcgggtcgtgagctgcgtcacggtttggaccgaagacgagtgttgcgggacgaggatttcgaagttgatgaaatgacagggatcagtcctgccagggcacacgtggctgcagccaaccttgtatcggcttacgagcagacagtaaaggaagagcgtaacttccaaaagtcttttaataatcatgtgcgaaccctgattgcccgcgaagaagttacccttggtttgatgcatttgtgggatttgatggaagctatcattcagaaccctactagcaaacctctgaccgcccagctgtttctggtggtgcaacacagcagagacaatgaggctttcagagaggcgctgctgaacatcaccgaacccgaggggagatggttgtatgatcttatcaacattctacagagtatcatagtgcaggagcggagcctgggcctggccgagaaggtggctgccatcaattactcggttttgagcttgggaaaatattacgctcgcaaaatctacaagactccatacgttcccatagacaaggaggtgaagatagatgggttctacatgcgcatgacgctcaaggtcttgaccctgagcgatgatcttggggtgtatcgcaatgacagaatgcatcgcgcggttagcgccagcaggaggcgcgagttaagcgacagggaactgatgcacagtttgcaaagagctctgactggagctggaaccgagggtgagaattacttcgacatgggagctgacttgcagtggcagcctagtcgcagggctctgagcgccgcgacggcaggatgtgagcttccttacatagaagaggcggatgaaggcgaggaggaagagggcgagtacttggaagactgatggcacaacccgtgttttttgctagatggaacagcaagcaccggatcccgcaatgcgggcggcgctgcagagccagccgtccggcattaactcctcggacgattggacccaggccatgcaacgtatcatggcgttgacgactcgcaaccccgaagcctttagacagcaaccccaggccaaccgtctatcggccatcatggaagctgtagtgccttcccgctctaatcccactcatgagaaggtcctggccatcgtgaacgcgttggtggagaacaaagctattcgtccagatgaggccggactggtatacaacgctctcttagaacgcgtggctcgctacaacagtagcaatgtgcaaaccaatttggaccgtatgataacagatgtacgcgaagccgtgtctcagcgcgaaaggttccagcgtgatgccaacctgggttcgctggtggcgttaaatgctttcttgagtactcagcctgctaatgtgccgcgtggtcaacaggattatactaactttttaagtgctttgagactgatggtatcagaagtacctcagagcgaagtgtatcagtccggtcctgattacttctttcagactagcagacagggcttgcagacggtaaatctgagccaagcttttaaaaaccttaaaggtttgtggggagtgcatgccccggtaggagaaagagcaaccgtgtctagcttgttaactccgaactcccgcctattattactgttggtagctcctttcaccgacagcggtagcatcgaccgtaattcctatttgggttacctactaaacctgtatcgcgaagccatagggcaaagtcaggtggacgagcagacctatcaagaaattacccaagtcagtcgcgctttgggacaggaagacactggcagtttggaagccactctgaacttcttgcttaccaatcggtctcaaaagatccctcctcaatatgctcttactgcggaggaggagaggatccttagatatgtgcagcagagcgtgggattgtttctgatgcaagagggggcaactccgactgcagcactggacatgacagcgcgaaatatggagcccagcatgtatgccagtaaccgacctttcattaacaaactgctggactacttgcacagagctgccgctatgaactctgattatttcaccaatgccatcttaaacccgcactggctgcccccacctggtttctacacgggcgaatatgacatgcccgaccctaatgacggatttctgtgggacgacgtggacagcgatgttttttcacctctttctgatcatcgcacgtggaaaaaggaaggcggcgatagaatgcattcttctgcatcgctgtccggggtcatgggtgctaccgcggctgagcccgagtctgcaagtccttttcctagtctacccttttctctacacagtgtacgtagcagcgaagtgggtagaataagtcgcccgagtttaatgggcgaagaggagtatctaaacgattccttgctcagaccggcaagagaaaaaaatttcccaaacaatggaatagaaagtttggtggataaaatgagtagatggaagacttatgctcaggatcacagagacgagcctgggatcatggggattacaagtagagcgagccgtagacgccagcgccatgacagacagaggggtcttgtgtgggacgatgaggattcggccgatgatagcagcgtgctggacttgggtgggagaggaaggggcaacccgtttgctcatttgcgccctcgcttgggtggtatgttgtaaaaaaaaataaaaaaaaaactcaccaaggccatggcgacgagcgtacgttcgttcttctttattatctgtgtctagtataatgaggcgagtcgtgctaggcggagcggtggtgtatccggagggtcctcctccttcgtacgagagcgtgatgcagcagcagcaggcgacggcggtgatgcaatccccactggaggctccctttgtgcctccgcgatacctggcacctacggagggcagaaacagcattcgttattcggaactggcacctcagtacgataccaccaggttgtatctggtggacaacaagtcggcggacattgcttctctgaactatcagaatgaccacagcaacttcttgaccacggtggtgcaaaacaatgactttacccctacggaagccagcacccagaccattaactttgatgaacgatcgcggtggggcggtcagctaaagaccatcatgcatactaacatgccaaacgtgaacgagtatatgtttagtaacaagttcaaagcgcgtgtgatggtgtccagaaaacctcccgacggtgctgcagttggggatacttatgatcacaagcaggatattttgaaatatgagtggttcgagtttactttgccagaaggcaacttttcagttactatgactattgatttgatgaacaatgccatcatagataattacttgaaagtgggtagacagaatggagtgcttgaaagtgacattggtgttaagttcgacaccaggaacttcaagctgggatgggatcccgaaaccaagttgatcatgcctggagtgtatacgtatgaagccttccatcctgacattgtcttactgcctggctgcggagtggattttaccgagagtcgtttgagcaaccttcttggtatcagaaaaaaacagccatttcaagagggttttaagattttgtatgaagatttagaaggtggtaatattccggccctcttggatgtagatgcctatgagaacagtaagaaagaacaaaaagccaaaatagaagctgctacagctgctgcagaagctaaggcaaacatagttgccagcgactctacaagggttgctaacgctggagaggtcagaggagacaattttgcgccaacacctgttccgactgcagaatcattattggccgatgtgtctgaaggaacggacgtgaaactcactattcaacctgtagaaaaagatagtaagaatagaagctataatgtgttggaagacaaaatcaacacagcctatcgcagttggtatctttcgtacaattatggcgatcccgaaaaaggagtgcgttcctggacattgctcaccacctcagatgtcacctgcggagcagagcaggtctactggtcgcttccagacatgatgaaggatcctgtcactttccgctccactagacaagtcagtaactaccctgtggtgggtgcagagcttatgcccgtcttctcaaagagcttctacaacgaacaagctgtgtactcccagcagctccgccagtccacctcgcttacgcacgtcttcaaccgctttcctgagaaccagattttaatccgtccgccggcgcccaccattaccaccgtcagtgaaaacgttcctgctctcacagatcacgggaccctgccgttgcgcagcagtatccggggagtccaacgtgtgaccgttactgacgccagacgccgcacctgtccctacgtgtacaaggcactgggcatagtcgcaccgcgcgtcctttcaagccgcactttctaaaaaaaaaaaaaatgtccattcttatctcgcccagtaataacaccggttggggtctgcgcgctccaagcaagatgtacggaggcgcacgcaaacgttctacccaacatcctgtccgtgttcgcggacattttcgcgctccatggggcgccctcaagggccgcactcgcgttcgaaccaccgtcgatgatgtaatcgatcaggtggttgccgacgcccgtaattatactcctactgcgcctacatctactgtggatgcagttattgacagtgtagtggctgacgctcgcaactatgctcgacgtaagagccggcgaaggcgcattgccagacgccaccgagctaccactgccatgcgagccgcaagagctctgctacgaagagctagacgcgtggggcgaagagccatgcttagggcggccagacgtgcagcttcgggcgccagcgccggcaggtcccgcaggcaagcagccgctgtcgcagcggcgactattgccgacatggcccaatcgcgaagaggcaatgtatactgggtgcgtgacgctgccaccggtcaacgtgtacccgtgcgcacccgtccccctcgcacttagaagatactgagcagtctccgatgttgtgtcccagcggcgaggatgtccaagcgcaaatacaaggaagaaatgctgcaggttatcgcacctgaagtctacggccaaccgttgaaggatgaaaaaaaaccccgcaaaatcaagcgggttaaaaaggacaaaaaagaagaggaagatggcgatgatgggctggcggagtttgtgcgcgagtttgccccacggcgacgcgtgcaatggcgtgggcgcaaagttcgacatgtgttgagacctggaacttcggtggtctttacacccggcgagcgttcaagcgctacttttaagcgttcctatgatgaggtgtacggggatgatgatattcttgagcaggcggctgaccgattaggcgagtttgcttatggcaagcgtagtagaataacttccaaggatgagacagtgtcgatacccttggatcatggaaatcccacccctagtcttaaaccggtcactttgcagcaagtgttacccgtaactccgcgaacaggtgttaaacgcgaaggtgaagatttgtatcccactatgcaactgatggtacccaaacgccagaagttggaggacgttttggagaaagtaaaagtggatccagatattcaacctgaggttaaagtgagacccattaagcaggtagcgcctggtctgggggtacaaactgtagacattaagattcccactgaaagtatggaagtgcaaactgaacccgcaaagcctactgccacctccactgaagtgcaaacggatccatggatgcccatgcctattacaactgacgccgccggtcccactcgaagatcccgacgaaagtacggtccagcaagtctgttgatgcccaattatgttgtacacccatctattattcctactcctggttaccgaggcactcgctactatcgcagccgaaacagtacctcccgccgtcgccgcaagacacctgcaaatcgcagtcgtcgccgtagacgcacaagcaaaccgactcccggcgccctggtgcggcaagtgtaccgcaatggtagtgcggaacctttgacactgccgcgtgcgcgttaccatccgagtatcatcacttaatcaatgttgccgctgcctccttgcagatatggccctcacttgtcgccttcgcgttcccatcactggttaccgaggaagaaactcgcgccgtagaagagggatgttgggacgcggaatgcgacgctacaggcgacggcgtgctatccgcaagcaattgcggggtggttttttaccagccttaattccaattatcgctgctgcaattggcgcgataccaggcatagcttccgtggcggttcaggcctcgcaacgacattgacattggaaaaaaacgtataaataaaaaaaaaaaaatacaatggactctgacactcctggtcctgtgactatgttttcttagagatggaagacatcaatttttcatccttggctccgcgacacggcacgaagccgtacatgggcacctggagcgacatcggcacgagccaactgaacgggggcgccttcaattggagcagtatctggagcgggcttaaaaattttggctcaaccataaaaacatacgggaacaaagcttggaacagcagtacaggacaggcgcttagaaataaacttaaagaccagaacttccaacaaaaagtagtcgatgggatagcttccggcatcaatggagtggtagatttggctaaccaggctgtgcagaaaaagataaacagtcgtttggacccgccgccagcaaccccaggtgaaatgcaagtggaggaagaaattcctccgccagaaaaacgaggcgacaagcgtccgcgtcccgatttggaagagacgctggtgacgcgcgtagatgaaccgccttcttatgaggaagcaacgaagcttggaatgcccaccactagaccgatagccccaatggccaccggggtgatgaaaccttctcagttgcatcgacccgtcaccttggatttgccccctccccctgctgctactgctgtacccgcttctaagcctgtcgctgccccgaaaccagtcgccgtagccaggtcacgtcccgggggcgctcctcgtccaaatgcgcactggcaaaatactctgaacagcatcgtgggtctaggcgtgcaaagtgtaaaacgccgtcgctgcttttaattaaatatggagtagcgcttaacttgcctatctgtgtatatgtgtcattacacgccgtcacagcagcagaggaaaaaaggaagaggtcgtgcgtcgacgctgagttactttcaagatggccaccccatcgatgctgccccaatgggcatacatgcacatcgccggacaggatgcttcggagtacctgagtccgggtctggtgcagttcgcccgcgccacagacacctacttcaatctgggaaataagtttagaaatcccaccgtagcgccgacccacgatgtgaccaccgaccgtagccagcggctcatgttgcgcttcgtgcccgttgaccgggaggacaatacatactcttacaaagtgcggtacaccctggccgtgggcgacaacagagtgctggatatggccagcacgttctttgacattaggggtgtgttggacagaggtcccagtttcaaaccctattctggtacggcttacaactccctggctcctaaaggcgctccaaatacatctcagtggattgcagaaggtgtaaaaaatacaactggtgaggaacacgtaacagaagaggaaaccaatactactacttacacttttggcaatgctcctgtaaaagctgaagctgaaattacaaaagaaggactcccagtaggtttggaagtttcagatgaagaaagtaaaccgatttatgctgataaaacatatcagccagaacctcagctgggagatgaaacttggactgaccttgatggaaaaaccgaaaagtatggaggcagggctctcaaacccgatactaagatgaaaccatgctacgggtcctttgccaaacctactaatgtgaaaggcggtcaggcaaaacaaaaaacaacggagcagccaaatcagaaagtcgaatatgatatcgacatggagttttttgatgcggcatcgcagaaaacaaacttaagtcctaaaattgtcatgtatgcagaaaatgtaaatttggaaactccagacactcatgtagtgtacaaacctggaacagaagacacaagttccgaagctaatttgggacaacaatctatgcccaacagacccaactacattggcttcagagataactttattggacttatgtactataacagtactggtaacatgggggtgctggctggtcaagcgtctcagttaaatgcagtggttgacttgcaggacagaaacacagaactttcttaccaactcttgcttgactctctgggcgacagaaccagatactttagcatgtggaatcaggctgtggacagttatgatcctgatgtacgtgttattgaaaatcatggtgtggaagatgaacttcccaactactgttttccactggacggcataggtgttccaacaaccagttacaaatcaatagttccaaatggagacaatgcgcctaattggaaggaacctgaagtaaatggaacaagtgagatcggacagggtaatttgtttgccatggaaattaaccttcaagccaatctatggcgaagtttcctttattccaatgtggctctatatctcccagactcgtacaaatacaccccgtccaatgtcactcttccagaaaacaaaaacacctacgactacatgaacgggcgggtggtgccgccatctctagtagacacctatgtgaacattggtgccaggtggtctctggatgccatggacaatgtcaacccattcaaccaccaccgtaacgctggcttgcgttaccgatccatgcttctgggtaacggacgttatgtgcctttccacatacaagtgcctcaaaaattcttcgctgttaaaaacctgctgcttctcccaggctcctacacttatgagtggaactttaggaaggatgtgaacatggttctacagagttccctcggtaacgacctgcgggtagatggcgccagcatcagtttcacgagcatcaacctctatgctacttttttccccatggctcacaacaccgcttccacccttgaagccatgctgcggaatgacaccaatgatcagtcattcaacgactacctatctgcagctaacatgctctaccccattcctgccaatgcaaccaatattcccatttccattccttctcgcaactgggcggctttcagaggctggtcatttaccagactgaaaaccaaagaaactccctctttggggtctggatttgacccctactttgtctattctggttctattccctacctggatggtaccttctacctgaaccacacttttaagaaggtttccatcatgtttgactcttcagtgagctggcctggaaatgacaggttactatctcctaacgaatttgaaataaagcgcactgtggatggcgaaggctacaacgtagcccaatgcaacatgaccaaagactggttcttggtacagatgctcgccaactacaacatcggctatcagggcttctacattccagaaggatacaaagatcgcatgtattcatttttcagaaacttccagcccatgagcaggcaggtggttgatgaggtcaattacaaagacttcaaggccgtcgccataccctaccaacacaacaactctggctttgtgggttacatggctccgaccatgcgccaaggtcaaccctatcccgctaactatccctatccactcattggaacaactgccgtaaatagtgttacgcagaaaaagttcttgtgtgacagaaccatgtggcgcataccgttctcgagcaacttcatgtctatgggggcccttacagacttgggacagaatatgctctatgccaactcagctcatgctctggacatgacctttgaggtggatcccatggatgagcccaccctgctttatcttctcttcgaagttttcgacgtggtcagagtgcatcagccacaccgcggcatcatcgaggcagtctacctgcgtacaccgttctcggccggtaacgctaccacgtaagaagcttcttgcttcttgcaaatagcagctgcaaccatggcctgcggatcccaaaacggctccagcgagcaagagctcagagccattgtccaagacctgggttgcggaccctattttttgggaacctacgataagcgcttcccggggttcatggcccccgataagctcgcctgtgccattgtaaatacggccggacgtgagacggggggagagcactggttggctttcggttggaacccacgttctaacacctgctacctttttgatccttttggattctcggatgatcgtctcaaacagatttaccagtttgaatatgagggtctcctgcgccgcagcgctcttgctaccaaggaccgctgtattacgctggaaaaatctacccagaccgtgcagggtccccgttctgccgcctgcggacttttctgctgcatgttccttcacgcctttgtgcactggcctgaccgtcccatggacggaaaccccaccatgaaattgctaactggagtgccaaacaacatgcttcattctcctaaagtccagcccaccctgtgtgacaatcaaaaagcactctaccattttcttaatacccattcgccttattttcgctcccatcgtacacacatcgaaagggccactgcgttcgaccgtatggatgttcaataatgactcatgtaaacaacgtgttcaataaacatcactttatttttttacatgtatcaaggctctgcattacttatttatttacaagtcgaatgggttctgacgagaatcagaatgacccgcaggcagtgatacgttgcggaactgatacttgggttgccacttgaattcgggaatcaccaacttgggaaccggtatatcgggcaggatgtcactccacagctttctggtcagctgcaaagctccaagcaggtcaggagccgaaatcttgaaatcacaattaggaccagtgctttgagcgcgagagttgcggtacaccggattgcagcactgaaacaccatcagcgacggatgtctcacgcttgccagcacggtgggatctgcaatcatgcccacatccagatcttcagcattggcaatgctgaacggggtcatcttgcaggtctgcctacccatggcgggcacccaattaggcttgtggttgcaatcgcagtgcagggggatcagtatcatcttggcctgatcctgtctgattcctggatacacggctctcatgaaagcatcatattgcttgaaagcctgctgggctttactaccctcggtataaaacatcccgcaggacctgctcgaaaactggttagctgcacagccggcatcattcacacagcagcgggcgtcattgttagctatttgcaccacacttctgccccagcggttttgggtgattttggttcgctcgggattctcctttaaggctcgttgtccgttctcgctggccacatccatctcgataatctgctccttctgaatcataatattgccatgcaggcacttcagcttgccctcataatcattgcagccatgaggccacaacgcacagcctgtacattcccaattatggtgggcgatctgagaaaaagaatgtatcattccctgcagaaatcttcccatcatcgtgctcagtgtcttgtgactagtgaaagttaactggatgcctcggtgctcctcgtttacgtactggtgacagatgcgcttgtattgttcgtgttgctcaggcattagtttaaaagaggttctaagttcgttatccagcctgtacttctccatcagcagacacatcacttccatgcctttctcccaagcagacaccaggggcaagctaatcggattcttaacagtgcaggcagcagctcctttagccagagggtcatctttagcgatcttctcaatgcttcttttgccatccttctcaacgatgcgcacgggcgggtagctgaaacccactgctacaagttgcgcctcttctctttcttcttcgctgtcttgactgatgtcttgcatggggatatgtttggtcttccttggcttctttttggggggtatcggaggaggaggactgtcgctccgttccggagacagggaggattgtgacgtttcgctcaccattaccaactgactgtcggtagaagaacctgaccccacacggcgacaggtgtttctcttcgggggcagaggtggaggcgattgcgaagggctgcggtccgacctggaaggcggatgactggcagaaccccttccgcgttcgggggtgtgctccctgtggcggtcgcttaactgatttccttcgcggctggccattgtgttctcctaggcagagaaacaacagacatggaaactcagccattgctgtcaacatcgccacgagtgccatcacatctcgtcctcagcgacgaggaaaaggagcagagcttaagcattccaccgcccagtcctgccaccacctctaccctagaagataaggaggtcgacgcatctcatgacatgcagaataaaaaagcgaaagagtctgagacagacatcgagcaagacccgggctatgtgacaccggtggaacacgaggaagagttgaaacgctttctagagagagaggatgaaaactgcccaaaacaacgagcagataactatcaccaagatgctggaaatagggatcagaacaccgactacctcatagggcttgacggggaagacgcgctccttaaacatctagcaagacagtcgctcatagtcaaggatgcattattggacagaactgaagtgcccatcagtgtggaagagctcagccgcgcctacgagcttaacctcttttcacctcgtactccccccaaacgtcagccaaacggcacctgcgagccaaatcctcgcttaaacttttatccagcttttgctgtgccagaagtactggctacctatcacatcttttttaaaaatcaaaaaattccagtctcctgccgcgctaatcgcacccgcgccgatgccctactcaatctgggacctggttcacgcttacctgatatagcttccttggaagaggttccaaagatcttcgagggtctgggcaataatgagactcgggccgcaaatgctctgcaaaagggagaaaatggcatggatgagcatcacagcgttctggtggaattggaaggcgataatgccagactcgcagtactcaagcgaagcatcgaggtcacacacttcgcatatcccgctgtcaacctgccccctaaagtcatgacggcggtcatggaccagttactcattaagcgcgcaagtcccctttcagaagacatgcatgacccagatgcctgtgatgagggtaaaccagtggtcagtgatgagcagctaacccgatggctgggcaccgactctcccagggatttggaagagcgtcgcaagcttatgatggccgtggtgctggttaccgtagaactagagtgtctccgacgtttctttaccgattcagaaaccttgcgcaaactcgaagagaatctgcactacacttttagacacggctttgtgcggcaggcatgcaagatatctaacgtggaactcaccaacctggtttcctacatgggtattctgcatgagaatcgcctaggacaaagcgtgctgcacagcaccctgaagggggaagcccgccgtgattacatccgcgattgtgtctatctgtacctgtgccacacgtggcaaaccggcatgggtgtatggcagcaatgtttagaagaacagaacttgaaagagcttgacaagctcttacagaaatctcttaaggttctgtggacagggttcgacgagcgcaccgtcgcttccgacctggcagacctcatcttcccagagcgtctcagggttactttgcgaaacggattgcctgactttatgagccagagcatgcttaacaattttcgctctttcatcctggaacgctccggtatcctgcccgccacctgctgcgcactgccctccgactttgtgcctctcacctaccgcgagtgccccccgccgctatggagtcactgctacctgttccgtctggccaactatctctcctaccactcggatgtgatcgaggatgtgagcggagacggcttgctggagtgtcactgccgctgcaatctgtgcacgccccaccggtccctagcttgcaacccccagttgatgagcgaaacccagataataggcacctttgaattgcaaggccccagcagccaaggcgatgggtcttctcctgggcaaagtttaaaactgaccccgggactgtggacctccgcctacttgcgcaagtttgctccggaagattaccacccctatgaaatcaagttctatgaggaccaatcacagcctccaaaggccgaactttcggcctgcgtcatcacccagggggcaattctggcccaattgcaagccatccaaaaatcccgccaagaatttctactgaaaaagggtaagggggtctaccttgacccccagaccggcgaggaactcaacacaaggttccctcaggatgtcccaacgacgagaaaacaagaagttgaaggtgcagccgccgcccccagaagatatggaggaagattgggacagtcaggcagaggaggcggaggaggacagtctggaggacagtctggaggaagacagtttggaggaggaaaacgaggaggcagaggaggtggaagaagtaaccgccgacaaacagttatcctcggctgcggagacaagcaacagcgctaccatctccgctccgagtcgaggaacccggcggcgtcccagcagtagatgggacgagaccggacgcttcccgaacccaaccagcgcttccaagaccggtaagaaggatcggcagggatacaagtcctggcgggggcataagaatgccatcatctcctgcttgcatgagtgcgggggcaacatatccttcacgcggcgctacttgctattccaccatggggtgaactttccgcgcaatgttttgcattactaccgtcacctccacagcccctactatagccagcaaatcccggcagtctcgacagataaagacagcggcggcgacctccaacagaaaaccagcagcggcagttagaaaatacacaacaagtgcagcaacaggaggattaaagattacagccaacgagccagcgcaaacccgagagttaagaaatcggatctttccaaccctgtatgccatcttccagcagagtcggggtcaagagcaggaactgaaaataaaaaaccgatctctgcgttcgctcaccagaagttgtttgtatcacaagagcgaagatcaacttcagcgcactctcgaggacgccgaggctctcttcaacaagtactgcgcgctgactcttaaagagtaggcagcgaccgcgcttattcaaaaaaggcgggaattacatcatcctcgacatgagtaaagaaattcccacgccttacatgtggagttatcaaccccaaatgggattggcggcaggcgcctcccaggactactccacccgcatgaattggctcagcgccgggccttctatgatttctcgagttaatgatatacgcgcctaccgaaaccaaatacttttggaacagtcagctcttaccaccacgccccgccaacaccttaatcccagaaattggcccgccgccctagtgtaccaggaaagtcccgctcccaccactgtattacttcctcgagacgcccaggccgaagtccaaatgactaatgcaggtgcgcagttagctggcggctccaccctatgtcgtcacaggcctcggcataatataaaacgcctgatgatcagaggccgaggtatccagctcaacgacgagtcggtgagctctccgcttggtctacgaccagacggaatctttcagattgccggctgcgggagatcttccttcacccctcgtcaggctgttctgactttggaaagttcgtcttcgcaaccccgctcgggcggaatcgggaccgttcaatttgtggaggagtttactccctctgtctacttcaaccccttctccggatctcctgggcattacccggacgagttcataccgaacttcgacgcgattagcgagtcagtggacggctacgattgatgtctggtgacgcggctgagctatctcggctgcgacatctagaccactgccgccgctttcgctgctttgcccgggaactcattgagttcatctacttcgaactccccaaggatcaccctcaaggtccggcccacggagtgcggatttctatcgaaggcaaaatagactctcgcctgcaacgaattttctcccagcggcccgtgctgatcgagcgagaccagggaaacaccacggtttccatctactgcatttgtaatcaccccggattgcatgaaagcctttgctgtcttatgtgtactgagtttaataaaaactgaattaagactctcctacggactgccgcttcttcaacccggattttacaaccagaagaacgaaacttttcctgtcgtccaggactctgttaacttcacctttcctactcacaaactagaagctcaacgactacaccgcttttccagaagcattttccctactaatactactttcaaaaccggaggtgagctccaaggtcttcctacagaaaacccttgggtggaagcgggccttgtagtgctaggaattcttgcgggtgggcttgtgattattctttgctacctatacacaccttgcttcactttcttagtggtgttgtggtattggtttaaaaaatggggcccatactagtcttgcttgttttactttcgcttttggaaccgggttctgccaattacgatccatgtctagacttcgacccagaaaactgcacacttacttttgcacccgacacaagccgcatctgtggagttcatcgcctctcttacgaacttggcccccaacgacaaaaatttacctgcatggtgggaatcaaccccatagttatcacccagcaaagtggagatactaagggttgcattcactgctcctgcgattccatcgagtgcacctacaccctgctgaagaccctatgcggcctaagagacctgctaccaatgaattaaaaaatgattaataaaaaatcacttacttgaaatcagcaataaggtctctgttgaaattttctcccagcagcacctcacttccctcttcccaactctggtattctaaaccccgttcagcggcatactttctccatactttaaaggggatgtcaaattttagctcctctcctgtacccacaatcttcatgtctttcttcccagatgaccaagagagtccggctcagtgactccttcaaccctgtctacccctatgaagatgaaagcacctcccaacacccctttataaacccagggtttatttccccaaatggcttcacacaaagcccaaacggagttcttactttaaaatgtttaaccccactaacaaccacaggcggatctctacagctaaaagtgggagggggacttacagtggatgacaccaacggttttttgaaagaaaacataagtgccaccacaccactcgttaagactggtcactctataggtttaccactaggagccggattgggaacgaatgaaaataaactttgtatcaaattaggacaaggacttacattcaattcaaacaacatttgcattgatgacaatattaacaccttatggacaggagtcaaccccaccgaagccaactgtcaaatcatgaactccagtgaatctaatgattgcaaattaattctaacactagttaaaactggagcactagtcactgcatttgtttatgttataggagtatctaacaattttaatatgctaactacacacagaaatataaattttactgcagagctgtttttcgattctactggtaatttactaactagactctcatccctcaaaactccacttaatcataaatcaggacaaaacatggctactggtgccattactaatgctaaaggtttcatgcccagcacgactgcctatcctttcaatgataattctagagaaaaagaaaactacatttacggaacttgttactacacagctagtgatcgcactgcttttcccattgacatatctgtcatgcttaaccgaagagcaataaatgacgagacatcatattgtattcgtataacttggtcctggaacacaggagatgccccagaggtgcaaacctctgctacaaccctagtcacctccccatttaccttttactacatcagagaagacgactgacaaataaagtttgcgatcgcggctcccgccagatctagtaatcaattacggggtcattagttcatagcccatatatggagttccgcgttacataacttacggtaaatggcccgcctggctgaccgcccaacgacccccgcccattgacgtcaataatgacgtatgttcccatagtaacgccaatagggactttccattgacgtcaatgggtggagtatttacggtaaactgcccacttggcagtacatcaagtgtatcatatgccaagtacgccccctattgacgtcaatgacggtaaatggcccgcctggcattatgcccagtacatgaccttatgggactttcctacttggcagtacatctacgtattagtcatcgctattaccatgctgatgcggttttggcagtacatcaatgggcgtggatagcggtttgactcacggggatttccaagtctccaccccattgacgtcaatgggagtttgttttggcaccaaaatcaacgggactttccaaaatgtcgtaacaactccgccccattgacgcaaatgggcggtaggcgtgtacggtgggaggtctatataagcagagctggtttagtgaaccgtcagatcagatctttgtcgatcctaccatccactcgacacacccgccagcggccgctgccaagcttccgagctctcgaattcaaaggaggtaccaccatgcaggccgaaggccggggcacagggggttcgacgggcgatgctgatggcccaggaggccctggcattcctgatggcccagggggcaatgctggcggcccaggagaggcgggtgccacgggcggcagaggtccccggggcgcaggggcagcaagggcctcggggccgggaggaggcgccccgcggggtccgcatggcggcgcggcttcagggctgaatggatgctgcagatgcggggccagggggccggagagccgcctgcttgagttctacctcgccatgcctttcgcgacacccatggaagcagagctggcccgcaggagcctggcccaggatgccccaccgcttcccgtgccaggggtgcttctgaaggagttcactgtgtccggcaacatactgactatccgactgactgctgcagaccaccgccaactgcagctctccatcagctcctgtctccagcagctttccctgttgatgtggatcacgcagtgctttctgcccgtgtttttggctcagcctccctcagggcagaggcgctaagctagcttgactgactgagatacagcgtaccttcagctcacagacatgataagatacattgatgagtttggacaaaccacaactagaatgcagtgaaaaaaatgctttatttgtgaaatttgtgatgctattgctttatttgtaaccattataagctgcaataaacaagttaacaacaacaattgcattcattttatgtttcaggttcagggggaggtgtgggaggttttttaaagcaagtaaaacctctacaaatgtggtagtcgtcagctatcctgcaggaacttgtttatttgaaaatcaattcacaaaatccgagtagttattttgcctcccccttcccatttaacagaatacaccaatctctccccacgcacagctttaaacatttggataccattagatatagacatggttttagattccacattccaaacagtttcagagcgagccaatctggggtcagtgatagataaaaatccatcgggatagtcttttaaagcgctttcacagtccaactgctgcggatgcgactccggagtctggatcacggtcatctggaagaagaacgatgggaatcataatccgaaaacggtatcggacgattgtgtctcatcaaacccacaagcagccgctgtctgcgtcgctccgtgcgactgctgtttatgggatcagggtccacagtgtcctgaagcatgattttaatagcccttaacatcaactttctggtgcgatgcgcgcagcaacgcattctgatttcactcaaatctttgcagtaggtacaacacattattacaatattgtttaataaaccataattaaaagcgctccagccaaaactcatatctgatataatcgcccctgcatgaccatcataccaaagtttaatataaattaaatgacgttccctcaaaaacacactacccacatacatgatctcttttggcatgtgcatattaacaatctgtctgtaccatggacaacgttggttaatcatgcaacccaatataaccttccggaaccacactgccaacaccgctcccccagccatgcattgaagtgaaccctgctgattacaatgacaatgaagaacccaattctctcgaccgtgaatcacttgagaatgaaaaatatctatagtggcacaacatagacataaatgcatgcatcttctcataatttttaactcctcaggatttagaaacatatcccagggaataggaagctcttgcagaacagtaaagctggcagaacaaggaagaccacgaacacaacttacactatgcatagtcatagtatcacaatctggcaacagcgggtggtcttcagtcatagaagctcgggtttcattttcctcacaacgtggtaactgggctctggtgtaagggtgatgtctggcgcatgatgtcgagcgtgcgcgcaaccttgtcataatggagttgcttcctgacattctcgtattttgtatagcaaaacgcggccctggcagaacacactcttcttcgccttctatcctgccgcttagcgtgttccgtgtgatagttcaagtacaaccacactcttaagttggtcaaaagaatgctggcttcagttgtaatcaaaactccatcgcatctaatcgttctgaggaaatcatccaagcaatgcaactggattgtgtttcaagcaggagaggagagggaagagacggaagaaccatgttaatttttattccaaacgatctcgcagtacttcaaattgtagatcgcgcagatggcatctctcgcccccactgtgttggtgaaaaagcacagctagatcaaaagaaatgcgattttcaaggtgctcaacggtggcttccagcaaagcctccacgcgcacatccaagaacaaaagaataccaaaagaaggagcattttctaactcctcaatcatcatattacattcctgcaccattcccagataattttcagctttccagccttgaattattcgtgtcagttcttgtggtaaatccaatccacacattacaaacaggtcccggagggcgccctccaccaccattcttaaacacaccctcataatgacaaaatatcttgctcctgtgtcacctgtagcgaattgagaatggcaacatcaattgacatgcccttggctctaagttcttctttaagttctagttgtaaaaactctctcatattatcaccaaactgcttagccagaagccccccgggaacaagagcaggggacgctacagtgcagtacaagcgcagacctccccaattggctccagcaaaaacaagattggaataagcatattgggaaccgccagtaatatcatcgaagttgctggaaatataatcaggcagagtttcttgtaaaaattgaataaaagaaaaatttgccaaaaaaacattcaaaacctctgggatgcaaatgcaataggttaccgcgctgcgctccaacattgttagttttgaattagtctgcaaaaataaaaaaaaaaacaagcgtcatatcatagtagcctgacgaacagatggataaatcagtctttccatcacaagacaagccacagggtctccagctcgaccctcgtaaaacctgtcatcatgattaaacaacagcaccgaaagttcctcgcggtgaccagcatgaataattcttgatgaagcatacaatccagacatgttagcatcagttaacgagaaaaaacagccaacatagcctttgggtataattatgcttaatcgtaagtatagcaaagccacccctcgcggatacaaagtaaaaggcacaggagaataaaaaatataattatttctctgctgctgttcaggcaacgtcgcccccggtccctctaaatacacatacaaagcctcatcagccatggcttaccagacaaagtacagcgggcacacaaagcacaagctctaaagtgactctccaacctctccacaatatatatatacacaagccctaaactgacgtaatgggagtaaagtgtaaaaaatcccgccaaacccaacacacaccccgaaactgcgtcaccagggaaaagtacagtttcacttccgcaatcccaacaggcgtaacttcctctttctcacggtacgtgatatcccactaacttgcaacgtcattttcccacggtcgcaccgccccttttagccgttaaccccacagccaatcaccacacgatccacactttttaaaatcacctcatttacatattggcaccattccatctataaggtatattatatagataga

SEQ ID NO: 58 - DNA, 35361 bp, Artificial Sequence
  NG-242 virus genome sequence consisting of a transgene cassette encoding an anti-CTLA-4 full length antibody inserted into the region BY.
tctatctatataatataccttatagatggaatggtgccaatatgtaaatgaggtgattttaaaaagtgtggatcgtgtggtgattggctgtggggttaacggctaaaaggggcggtgcgaccgtgggaaaatgacgttttgtgggggtggagtttttttgcaagttgtcgcgggaaatgtgacgcataaaaaggcttttttctcacggaactacttagttttcccacggtatttaacaggaaatgaggtagttttgaccggatgcaagtgaaaattgttgattttcgcgcgaaaactgaatgaggaagtgtttttctgaataatgtggtatttatggcagggtggagtatttgttcagggccaggtagactttgacccattacgtggaggtttcgattaccgtgttttttacctgaatttccgcgtaccgtgtcaaagtcttctgtttttacgtaggtgtcagctgatcgctagggtatttatacctcagggtttgtgtcaagaggccactcttgagtgccagcgagaagagttttctcctctgcgccggcagtttaataataaaaaaatgagagatttgcgatttctgcctcaggaaataatctctgctgagactggaaatgaaatattggagcttgtggtgcacgccctgatgggagacgatccggagccacctgtgcagctttttgagcctcctacgcttcaggaactgtatgatttagaggtagagggatcggaggattctaatgaggaagctgtaaatggcttttttaccgattctatgcttttagctgctaatgaagggttagaattagatccgcctttggacacttttgatactccaggggtaattgtggaaagcggtacaggtgtaagaaaattacctgatttgagttccgtggactgtgatttgcactgctatgaagacgggtttcctccgagtgatgaggaggaccatgaaaaggagcagtccatgcagactgcagcgggtgagggagtgaaggctgccaatgttggttttcagttggattgcccggagcttcctggacatggctgtaagtcttgtgaatttcacaggaaaaatactggagtaaaggaactgttatgttcgctttgttatatgagaacgcactgccactttatttacagtaagtgtgtttaagttaaaatttaaaggaatatgctgtttttcacatgtatattgagtgtgagttttgtgcttcttattataggtcctgtgtctgatgctgatgaatcaccatctcctgattctactacctcacctcctgagattcaagcacctgttcctgtggacgtgcgcaagcccattcctgtgaagcttaagcctgggaaacgtccagcagtggaaaaacttgaggacttgttacagggtggggacggacctttggacttgagtacacggaaacgtccaagacaataagtgttccatatccgtgtttacttaaggtgacgtcaatatttgtgtgacagtgcaatgtaataaaaatatgttaactgttcactggtttttattgctttttgggcggggactcaggtatataagtagaagcagacctgtgtggttagctcataggagctggctttcatccatggaggtttgggccattttggaagaccttaggaagactaggcaactgttagagaacgcttcggacggagtctccggtttttggagattctggttcgctagtgaattagctagggtagtttttaggataaaacaggactataaacaagaatttgaaaagttgttggtagattgcccaggactttttgaagctcttaatttgggccatcaggttcactttaaagaaaaagttttatcagttttagacttttcaaccccaggtagaactgctgctgctgtggcttttcttacttttatattagataaatggatcccgcagactcatttcagcaggggatacgttttggatttcatagccacagcattgtggagaacatggaaggttcgcaagatgaggacaatcttaggttactggccagtgcagcctttgggtgtagcgggaatcctgaggcatccaccggtcatgccagcggttctggaggaggaacagcaagaggacaacccgagagccggcctggaccctccagtggaggaggcggagtagctgacttgtctcctgaactgcaacgggtgcttactggatctacgtccactggacgggataggggcgttaagagggagagggcatctagtggtactgatgctagatctgagttggctttaagtttaatgagtcgcagacgtcctgaaaccatttggtggcatgaggttcagaaagagggaagggatgaagtttctgtattgcaggagaaatattcactggaacaggtgaaaacatgttggttggagcctgaggatgattgggaggtggccattaaaaattatgccaagatagctttgaggcctgataaacagtataagattactagacggattaatatccggaatgcttgttacatatctggaaatggggctgaggtggtaatagatactcaagacaaggcagttattagatgctgcatgatggatatgtggcctggggtagtcggtatggaagcagtaacttttgtaaatgttaagtttaggggagatggttataatggaatagtgtttatggccaataccaaacttatattgcatggttgtagcttttttggtttcaacaatacctgtgtagatgcctggggacaggttagtgtacggggatgtagtttctatgcgtgttggattgccacagctggcagaaccaagagtcaattgtctctgaagaaatgcatatttcaaagatgtaacctgggcattctgaatgaaggcgaagcaagggtccgccactgcgcttctacagatactggatgttttattttgattaagggaaatgccagcgtaaagcataacatgatttgcggtgcttccgatgagaggccttatcaaatgctcacttgtgctggtgggcattgtaatatgctggctactgtgcatattgtttcccatcaacgcaaaaaatggcctgtttttgatcacaatgtgatgacgaagtgtaccatgcatgcaggtgggcgtagaggaatgtttatgccttaccagtgtaacatgaatcatgtgaaagtgttgttggaaccagatgccttttccagaatgagcctaacaggaatttttgacatgaacatgcaaatctggaagatcctgaggtatgatgatacgagatcgagggtacgcgcatgcgaatgcggaggcaagcatgccaggttccagccggtgtgtgtagatgtgactgaagatctcagaccggatcatttggttattgcccgcactggagcagagttcggatccagtggagaagaaactgactaaggtgagtattgggaaaactttggggtgggattttcagatggacagattgagtaaaaatttgttttttctgtcttgcagctgtcatgagtggaaacgcttcttttaaggggggagtcttcagcccttatctgacagggcgtctcccatcctgggcaggagttcgtcagaatgttatgggatctactgtggatggaagacccgtccaacccgccaattcttcaacgctgacctatgctactttaagttcttcacctttggacgcagctgcagctgccgccgccgcttctgttgccgctaacactgtgcttggaatgggttactatggaagcatcatggctaattccacttcctctaataacccttctaccctgactcaggacaagttacttgtccttttggcccagctggaggctttgacccaacgtctgggtgaactttctcagcaggtggtcgagttgcgagtacaaactgagtctgctgtcggcacggcaaagtctaaataaaaaaatcccagaatcaatgaataaataaacaagcttgttgttgatttaaaatcaagtgtttttatttcatttttcgcgcacggtatgccctagaccaccgatctctatcattgagaactcggtggattttttccaggatcctatagaggtgggattgaatgtttagatacatgggcattaggccgtctttggggtggagatagctccattgaagggattcatgctccggggtagtgttgtaaatcacccagtcataacaaggtcgcagtgcatggtgttgcacaatatcttttagaagtaggctgattgccacagataagcccttggtgtaggtgtttacaaaccggttgagctgggatgggtgcattcggggtgaaattatgtgcattttggattggatttttaagttggcaatattgccgccaagatcccgtcttgggttcatgttatgaaggaccaccaagacggtgtatccggtacatttaggaaatttatcgtgcagcttggatggaaaagcgtggaaaaatttggagacacccttgtgtcctccaagattttccatgcactcatccatgataatagcaatggggccgtgggcagcggcgcgggcaaacacgttccgtgggtctgacacatcatagttatgttcctgagttaaatcatcataagccattttaatgaatttggggcggagagtaccagattggggtatgaatgttccttcgggccccggagcatagttcccctcacagatttgcatttcccaagctttcagttccgagggtggaatcatgtccacctggggggctatgaaaaacaccgtttctggggcgggggtgattaattgtgatgatagcaaatttctgagcaattgagatttgccacatccggtggggccataaatgattccgattacgggttgcaggtggtagtttagggaacggcaactgccgtcttctcgaagcaagggggccacctcgttcatcatttcccttacatgcatattttcccgcaccaaatccattaggaggcgctctcctcctagtgatagaagttcttgtagtgaggaaaagtttttcagcggtttcagaccgtcagccatgggcattttggagagagtttgctgcaaaagttctagtctgttccacagttcagtgatgtgttctatggcatctcgatccagcagacctcctcgtttcgcgggtttggacggctcctggaatagggtatgagacgatgggcgtccagcgctgccagggttcggtccttccagggtctcagtgttcgagtcagggttgtttccgtcacagtgaaggggtgtgcgcctgcttgggcgcttgccagggtgcgcttcagactcatcctgctggtcgaaaacttctgtcgcttggcgccctgtatgtcggccaagtagcagtttaccatgagttcgtagttgagcgcctcggctgcgtggcctttggcgcggagcttacctttggaagttttcttgcataccgggcagtataggcatttcagcgcatacaacttgggcgcaaggaaaacggattctggggagtatgcatctgcgccgcaggaggcgcaaacagtttcacattccaccagccaggttaaatccggttcattggggtcaaaaacaagttttccgccatattttttgatgcgtttcttacctttggtctccatgagttcgtgtcctcgttgagtgacaaacaggctgtccgtgtccccgtagactgattttacaggcctcttctccagtggagtgcctcggtcttcttcgtacaggaactctgaccactctgatacaaaggcgcgcgtccaggccagcacaaaggaggctatgtgggaggggtagcgatcgttgtcaaccagggggtccaccttttccaaagtatgcaaacacatgtcaccctcttcaacatccaggaatgtgattggcttgtaggtgtatttcacgtgacctggggtccccgctgggggggtataaaagggggcggttctttgctcttcctcactgtcttccggatcgctgtccaggaacgtcagctgttggggtaggtattccctctcgaaggcgggcatgacctctgcactcaggttgtcagtttctaagaacgaggaggatttgatattgacagtgccggttgagatgcctttcatgaggttttcgtccatctggtcagaaaacacaatttttttattgtcaagtttggtggcaaatgatccatacagggcgttggataaaagtttggcaatggatcgcatggtttggttcttttccttgtccgcgcgctctttggcggcgatgttgagttggacatactcgcgtgccaggcacttccattcggggaagatagttgttaattcatctggcacgattctcacttgccaccctcgattatgcaaggtaattaaatccacactggtggccacctcgcctcgaaggggttcattggtccaacagagcctacctcctttcctagaacagaaagggggaagtgggtctagcataagttcatcgggagggtctgcatccatggtaaagattcccggaagtaaatccttatcaaaatagctgatgggagtggggtcatctaaggccatttgccattctcgagctgccagtgcgcgctcatatgggttaaggggactgccccatggcatgggatgggtgagtgcagaggcatacatgccacagatgtcatagacgtagatgggatcctcaaagatgcctatgtaggttggatagcatcgcccccctctgatacttgctcgcacatagtcatatagttcatgtgatggcgctagcagccccggacccaagttggtgcgattgggtttttctgttctgtagacgatctggcgaaagatggcgtgagaattggaagagatggtgggtctttgaaaaatgttgaaatgggcatgaggtagacctacagagtctctgacaaagtgggcataagattcttgaagcttggttaccagttcggcggtgacaagtacgtctagggcgcagtagtcaagtgtttcttgaatgatgtcataacctggttggtttttcttttcccacagttcgcggttgagaaggtattcttcgcgatccttccagtactcttctagcggaaacccgtctttgtctgcacggtaagatcctagcatgtagaactgattaactgccttgtaagggcagcagcccttctctacgggtagagagtatgcttgagcagcttttcgtagcgaagcgtgagtaagggcaaaggtgtctctgaccatgactttgaggaattggtatttgaagtcgatgtcgtcacaggctccctgttcccagagttggaagtctacccgtttcttgtaggcggggttgggcaaagcgaaagtaacatcattgaagagaatcttgccggccctgggcatgaaattgcgagtgatgcgaaaaggctgtggtacttccgctcggttattgataacctgggcagctaggacgatctcgtcgaaaccgttgatgttgtgtcctacgatgtataattctatgaaacgcggcgtgcctctgacgtgaggtagcttactgagctcatcaaaggttaggtctgtggggtcagataaggcgtagtgttcgagagcccattcgtgcaggtgaggattcgctttaaggaaggaggaccagaggtccactgccagtgctgtttgtaactggtcccggtactgacgaaaatgccgtccgactgccattttttctggggtgacgcaatagaaggtttgggggtcctgccgccagcgatcccacttgagttttatggcgaggtcataggcgatgttgacgagccgctggtctccagagagtttcatgaccagcatgaaggggattagctgcttgccaaaggaccccatccaggtgtaggtttccacatcgtaggtgagaaagagcctttctgtgcgaggatgagagccaatcgggaagaactggatctcctgccaccagttggaggaatggctgttgatgtgatggaagtagaactccctgcgacgcgccgagcattcatgcttgtgcttgtacagacggccgcagtagtcgcagcgttgcacgggttgtatctcgtgaatgagttgtacctggcttcccttgacgagaaatttcagtgggaagccgaggcctggcgattgtatctcgtgctttactatgttgtctgcatcggcctgttcatcttctgtctcgatggtggtcatgctgacgagccctcgcgggaggcaagtccagacctcggcgcggcaggggcggagctcgaggacgagagcgcgcaggctggagctgtccagggtcctgagacgctgcggactcaggttagtaggcagtgtcaggagattaacttgcatgatcttttggagggcgtgcgggaggttcagatagtacttgatctcaacgggtccgttggtggagatgtcgatggcttgcagggttccgtgtcccttgggcgctaccaccgtgcccttgtttttcattttggacggcggtggctctgttgcttcttgcatgtttagaagcggtgtcgagggcgcgcaccgggcggcaggggcggctcgggacccggcggcatggctggcagtggtacgtcggcgccgcgcgcgggtaggttctggtactgcgccctgagaagactcgcatgcgcgacgacgcggcggttgacatcctggatctgacgcctctgggtgaaagctaccggccccgtgagcttgaacctgaaagagagttcaacagaatcaatctcggtatcgttgacggcggcttgcctaaggatttcttgcacgtcaccagagttgtcctggtaggcgatctccgccatgaactgctcgatctcttcctcttgaagatctccgcggcccgctctctcgacggtggccgcgaggtcgttggagatgcgcccaatgagttgagagaatgcattcatgcccgcctcgttccagacgcggctgtagaccacggcccccacgggatctctcgcgcgcatgaccacctgggcgaggttgagctccacgtggcgggtgaagaccgcatagttgcataggcgctggaaaaggtagttgagtgtggtggcgatgtgctcggtgacgaagaaatacatgatccatcgtctcagcggcatctcgctgacatcgcccagagcttccaagcgctccatggcctcgtagaagtccacggcaaaattaaaaaactgggagtttcgcgcggacacggtcaactcctcttccagaagacggataagttcggcgatggtggtgcgcacctcgcgctcgaaagcccctgggatttcttcctcaatctcttcttcttccactaacatctcttcctcttcaggtggggctgcaggaggagggggaacgcggcgacgccggcggcgcacgggcagacggtcgatgaatctttcaatgacctctccgcggcggcggcgcatggtttcagtgacggcgcggccgttctcgcgcggtcgcagagtaaaaacaccgccgcgcatctccttaaagtggtgactgggaggttctccgtttgggagggagagggcgctgattatacattttattaattggcccgtagggactgcacgcagagatctgatcgtgtcaagatccacgggatctgaaaacctttcgacgaaagcgtctaaccagtcacagtcacaaggtaggctgagtacggcttcttgtgggcgggggtggttatgtgttcggtctgggtcttctgtttcttcttcatctcgggaaggtgagacgatgctgctggtgatgaaattaaagtaggcagttctaagacggcggatggtggcgaggagcaccaggtctttgggtccggcttgctggatacgcaggcgattggccattccccaagcattatcctgacatctagcaagatctttgtagtagtcttgcatgagccgttctacgggcacttcttcctcacccgttctgccatgcatacgtgtgagtccaaatccgcgcattggttgtaccagtgccaagtcagctacgactctttcggcgaggatggcttgctgtacttgggtaagggtggcttgaaagtcatcaaaatccacaaagcggtggtaagctcctgtattaatggtgtaagcacagttggccatgactgaccagttaactgtctggtgaccagggcgcacgagctcggtgtatttaaggcgcgaataggcgcgggtgtcaaagatgtaatcgttgcaggtgcgcaccagatactggtaccctataagaaaatgcggcggtggttggcggtagagaggccatcgttctgtagctggagcgccaggggcgaggtcttccaacataaggcggtgatagccgtagatgtacctggacatccaggtgattcctgcggcggtagtagaagcccgaggaaactcgcgtacgcggttccaaatgttgcgtagcggcatgaagtagttcattgtaggcacggtttgaccagtgaggcgcgcgcagtcattgatgctctatagacacggagaaaatgaaagcgttcagcgactcgactccgtagcctggaggaacgtgaacgggttgggtcgcggtgtaccccggttcgagacttgtactcgagccggccggagccgcggctaacgtggtattggcactcccgtctcgacccagcctacaaaaatccaggatacggaatcgagtcgttttgctggtttccgaatggcagggaagtgagtcctattttttttttttgccgctcagatgcatcccgtgctgcgacagatgcgcccccaacaacagcccccctcgcagcagcagcagcagcaatcacaaaaggctgtccctgcaactactgcaactgccgccgtgagcggtgcgggacagcccgcctatgatctggacttggaagagggcgaaggactggcacgtctaggtgcgccttcacccgagcggcatccgcgagttcaactgaaaaaagattctcgcgaggcgtatgtgccccaacagaacctatttagagacagaagcggcgaggagccggaggagatgcgagcttcccgctttaacgcgggtcgtgagctgcgtcacggtttggaccgaagacgagtgttgcgggacgaggatttcgaagttgatgaaatgacagggatcagtcctgccagggcacacgtggctgcagccaaccttgtatcggcttacgagcagacagtaaaggaagagcgtaacttccaaaagtcttttaataatcatgtgcgaaccctgattgcccgcgaagaagttacccttggtttgatgcatttgtgggatttgatggaagctatcattcagaaccctactagcaaacctctgaccgcccagctgtttctggtggtgcaacacagcagagacaatgaggctttcagagaggcgctgctgaacatcaccgaacccgaggggagatggttgtatgatcttatcaacattctacagagtatcatagtgcaggagcggagcctgggcctggccgagaaggtggctgccatcaattactcggttttgagcttgggaaaatattacgctcgcaaaatctacaagactccatacgttcccatagacaaggaggtgaagatagatgggttctacatgcgcatgacgctcaaggtcttgaccctgagcgatgatcttggggtgtatcgcaatgacagaatgcatcgcgcggttagcgccagcaggaggcgcgagttaagcgacagggaactgatgcacagtttgcaaagagctctgactggagctggaaccgagggtgagaattacttcgacatgggagctgacttgcagtggcagcctagtcgcagggctctgagcgccgcgacggcaggatgtgagcttccttacatagaagaggcggatgaaggcgaggaggaagagggcgagtacttggaagactgatggcacaacccgtgttttttgctagatggaacagcaagcaccggatcccgcaatgcgggcggcgctgcagagccagccgtccggcattaactcctcggacgattggacccaggccatgcaacgtatcatggcgttgacgactcgcaaccccgaagcctttagacagcaaccccaggccaaccgtctatcggccatcatggaagctgtagtgccttcccgctctaatcccactcatgagaaggtcctggccatcgtgaacgcgttggtggagaacaaagctattcgtccagatgaggccggactggtatacaacgctctcttagaacgcgtggctcgctacaacagtagcaatgtgcaaaccaatttggaccgtatgataacagatgtacgcgaagccgtgtctcagcgcgaaaggttccagcgtgatgccaacctgggttcgctggtggcgttaaatgctttcttgagtactcagcctgctaatgtgccgcgtggtcaacaggattatactaactttttaagtgctttgagactgatggtatcagaagtacctcagagcgaagtgtatcagtccggtcctgattacttctttcagactagcagacagggcttgcagacggtaaatctgagccaagcttttaaaaaccttaaaggtttgtggggagtgcatgccccggtaggagaaagagcaaccgtgtctagcttgttaactccgaactcccgcctattattactgttggtagctcctttcaccgacagcggtagcatcgaccgtaattcctatttgggttacctactaaacctgtatcgcgaagccatagggcaaagtcaggtggacgagcagacctatcaagaaattacccaagtcagtcgcgctttgggacaggaagacactggcagtttggaagccactctgaacttcttgcttaccaatcggtctcaaaagatccctcctcaatatgctcttactgcggaggaggagaggatccttagatatgtgcagcagagcgtgggattgtttctgatgcaagagggggcaactccgactgcagcactggacatgacagcgcgaaatatggagcccagcatgtatgccagtaaccgacctttcattaacaaactgctggactacttgcacagagctgccgctatgaactctgattatttcaccaatgccatcttaaacccgcactggctgcccccacctggtttctacacgggcgaatatgacatgcccgaccctaatgacggatttctgtgggacgacgtggacagcgatgttttttcacctctttctgatcatcgcacgtggaaaaaggaaggcggcgatagaatgcattcttctgcatcgctgtccggggtcatgggtgctaccgcggctgagcccgagtctgcaagtccttttcctagtctacccttttctctacacagtgtacgtagcagcgaagtgggtagaataagtcgcccgagtttaatgggcgaagaggagtatctaaacgattccttgctcagaccggcaagagaaaaaaatttcccaaacaatggaatagaaagtttggtggataaaatgagtagatggaagacttatgctcaggatcacagagacgagcctgggatcatggggattacaagtagagcgagccgtagacgccagcgccatgacagacagaggggtcttgtgtgggacgatgaggattcggccgatgatagcagcgtgctggacttgggtgggagaggaaggggcaacccgtttgctcatttgcgccctcgcttgggtggtatgttgtaaaaaaaaataaaaaaaaaactcaccaaggccatggcgacgagcgtacgttcgttcttctttattatctgtgtctagtataatgaggcgagtcgtgctaggcggagcggtggtgtatccggagggtcctcctccttcgtacgagagcgtgatgcagcagcagcaggcgacggcggtgatgcaatccccactggaggctccctttgtgcctccgcgatacctggcacctacggagggcagaaacagcattcgttattcggaactggcacctcagtacgataccaccaggttgtatctggtggacaacaagtcggcggacattgcttctctgaactatcagaatgaccacagcaacttcttgaccacggtggtgcaaaacaatgactttacccctacggaagccagcacccagaccattaactttgatgaacgatcgcggtggggcggtcagctaaagaccatcatgcatactaacatgccaaacgtgaacgagtatatgtttagtaacaagttcaaagcgcgtgtgatggtgtccagaaaacctcccgacggtgctgcagttggggatacttatgatcacaagcaggatattttgaaatatgagtggttcgagtttactttgccagaaggcaacttttcagttactatgactattgatttgatgaacaatgccatcatagataattacttgaaagtgggtagacagaatggagtgcttgaaagtgacattggtgttaagttcgacaccaggaacttcaagctgggatgggatcccgaaaccaagttgatcatgcctggagtgtatacgtatgaagccttccatcctgacattgtcttactgcctggctgcggagtggattttaccgagagtcgtttgagcaaccttcttggtatcagaaaaaaacagccatttcaagagggttttaagattttgtatgaagatttagaaggtggtaatattccggccctcttggatgtagatgcctatgagaacagtaagaaagaacaaaaagccaaaatagaagctgctacagctgctgcagaagctaaggcaaacatagttgccagcgactctacaagggttgctaacgctggagaggtcagaggagacaattttgcgccaacacctgttccgactgcagaatcattattggccgatgtgtctgaaggaacggacgtgaaactcactattcaacctgtagaaaaagatagtaagaatagaagctataatgtgttggaagacaaaatcaacacagcctatcgcagttggtatctttcgtacaattatggcgatcccgaaaaaggagtgcgttcctggacattgctcaccacctcagatgtcacctgcggagcagagcaggtctactggtcgcttccagacatgatgaaggatcctgtcactttccgctccactagacaagtcagtaactaccctgtggtgggtgcagagcttatgcccgtcttctcaaagagcttctacaacgaacaagctgtgtactcccagcagctccgccagtccacctcgcttacgcacgtcttcaaccgctttcctgagaaccagattttaatccgtccgccggcgcccaccattaccaccgtcagtgaaaacgttcctgctctcacagatcacgggaccctgccgttgcgcagcagtatccggggagtccaacgtgtgaccgttactgacgccagacgccgcacctgtccctacgtgtacaaggcactgggcatagtcgcaccgcgcgtcctttcaagccgcactttctaaaaaaaaaaaaaatgtccattcttatctcgcccagtaataacaccggttggggtctgcgcgctccaagcaagatgtacggaggcgcacgcaaacgttctacccaacatcctgtccgtgttcgcggacattttcgcgctccatggggcgccctcaagggccgcactcgcgttcgaaccaccgtcgatgatgtaatcgatcaggtggttgccgacgcccgtaattatactcctactgcgcctacatctactgtggatgcagttattgacagtgtagtggctgacgctcgcaactatgctcgacgtaagagccggcgaaggcgcattgccagacgccaccgagctaccactgccatgcgagccgcaagagctctgctacgaagagctagacgcgtggggcgaagagccatgcttagggcggccagacgtgcagcttcgggcgccagcgccggcaggtcccgcaggcaagcagccgctgtcgcagcggcgactattgccgacatggcccaatcgcgaagaggcaatgtatactgggtgcgtgacgctgccaccggtcaacgtgtacccgtgcgcacccgtccccctcgcacttagaagatactgagcagtctccgatgttgtgtcccagcggcgaggatgtccaagcgcaaatacaaggaagaaatgctgcaggttatcgcacctgaagtctacggccaaccgttgaaggatgaaaaaaaaccccgcaaaatcaagcgggttaaaaaggacaaaaaagaagaggaagatggcgatgatgggctggcggagtttgtgcgcgagtttgccccacggcgacgcgtgcaatggcgtgggcgcaaagttcgacatgtgttgagacctggaacttcggtggtctttacacccggcgagcgttcaagcgctacttttaagcgttcctatgatgaggtgtacggggatgatgatattcttgagcaggcggctgaccgattaggcgagtttgcttatggcaagcgtagtagaataacttccaaggatgagacagtgtcgatacccttggatcatggaaatcccacccctagtcttaaaccggtcactttgcagcaagtgttacccgtaactccgcgaacaggtgttaaacgcgaaggtgaagatttgtatcccactatgcaactgatggtacccaaacgccagaagttggaggacgttttggagaaagtaaaagtggatccagatattcaacctgaggttaaagtgagacccattaagcaggtagcgcctggtctgggggtacaaactgtagacattaagattcccactgaaagtatggaagtgcaaactgaacccgcaaagcctactgccacctccactgaagtgcaaacggatccatggatgcccatgcctattacaactgacgccgccggtcccactcgaagatcccgacgaaagtacggtccagcaagtctgttgatgcccaattatgttgtacacccatctattattcctactcctggttaccgaggcactcgctactatcgcagccgaaacagtacctcccgccgtcgccgcaagacacctgcaaatcgcagtcgtcgccgtagacgcacaagcaaaccgactcccggcgccctggtgcggcaagtgtaccgcaatggtagtgcggaacctttgacactgccgcgtgcgcgttaccatccgagtatcatcacttaatcaatgttgccgctgcctccttgcagatatggccctcacttgtcgccttcgcgttcccatcactggttaccgaggaagaaactcgcgccgtagaagagggatgttgggacgcggaatgcgacgctacaggcgacggcgtgctatccgcaagcaattgcggggtggttttttaccagccttaattccaattatcgctgctgcaattggcgcgataccaggcatagcttccgtggcggttcaggcctcgcaacgacattgacattggaaaaaaacgtataaataaaaaaaaaaaaatacaatggactctgacactcctggtcctgtgactatgttttcttagagatggaagacatcaatttttcatccttggctccgcgacacggcacgaagccgtacatgggcacctggagcgacatcggcacgagccaactgaacgggggcgccttcaattggagcagtatctggagcgggcttaaaaattttggctcaaccataaaaacatacgggaacaaagcttggaacagcagtacaggacaggcgcttagaaataaacttaaagaccagaacttccaacaaaaagtagtcgatgggatagcttccggcatcaatggagtggtagatttggctaaccaggctgtgcagaaaaagataaacagtcgtttggacccgccgccagcaaccccaggtgaaatgcaagtggaggaagaaattcctccgccagaaaaacgaggcgacaagcgtccgcgtcccgatttggaagagacgctggtgacgcgcgtagatgaaccgccttcttatgaggaagcaacgaagcttggaatgcccaccactagaccgatagccccaatggccaccggggtgatgaaaccttctcagttgcatcgacccgtcaccttggatttgccccctccccctgctgctactgctgtacccgcttctaagcctgtcgctgccccgaaaccagtcgccgtagccaggtcacgtcccgggggcgctcctcgtccaaatgcgcactggcaaaatactctgaacagcatcgtgggtctaggcgtgcaaagtgtaaaacgccgtcgctgcttttaattaaatatggagtagcgcttaacttgcctatctgtgtatatgtgtcattacacgccgtcacagcagcagaggaaaaaaggaagaggtcgtgcgtcgacgctgagttactttcaagatggccaccccatcgatgctgccccaatgggcatacatgcacatcgccggacaggatgcttcggagtacctgagtccgggtctggtgcagttcgcccgcgccacagacacctacttcaatctgggaaataagtttagaaatcccaccgtagcgccgacccacgatgtgaccaccgaccgtagccagcggctcatgttgcgcttcgtgcccgttgaccgggaggacaatacatactcttacaaagtgcggtacaccctggccgtgggcgacaacagagtgctggatatggccagcacgttctttgacattaggggtgtgttggacagaggtcccagtttcaaaccctattctggtacggcttacaactccctggctcctaaaggcgctccaaatacatctcagtggattgcagaaggtgtaaaaaatacaactggtgaggaacacgtaacagaagaggaaaccaatactactacttacacttttggcaatgctcctgtaaaagctgaagctgaaattacaaaagaaggactcccagtaggtttggaagtttcagatgaagaaagtaaaccgatttatgctgataaaacatatcagccagaacctcagctgggagatgaaacttggactgaccttgatggaaaaaccgaaaagtatggaggcagggctctcaaacccgatactaagatgaaaccatgctacgggtcctttgccaaacctactaatgtgaaaggcggtcaggcaaaacaaaaaacaacggagcagccaaatcagaaagtcgaatatgatatcgacatggagttttttgatgcggcatcgcagaaaacaaacttaagtcctaaaattgtcatgtatgcagaaaatgtaaatttggaaactccagacactcatgtagtgtacaaacctggaacagaagacacaagttccgaagctaatttgggacaacaatctatgcccaacagacccaactacattggcttcagagataactttattggacttatgtactataacagtactggtaacatgggggtgctggctggtcaagcgtctcagttaaatgcagtggttgacttgcaggacagaaacacagaactttcttaccaactcttgcttgactctctgggcgacagaaccagatactttagcatgtggaatcaggctgtggacagttatgatcctgatgtacgtgttattgaaaatcatggtgtggaagatgaacttcccaactactgttttccactggacggcataggtgttccaacaaccagttacaaatcaatagttccaaatggagacaatgcgcctaattggaaggaacctgaagtaaatggaacaagtgagatcggacagggtaatttgtttgccatggaaattaaccttcaagccaatctatggcgaagtttcctttattccaatgtggctctatatctcccagactcgtacaaatacaccccgtccaatgtcactcttccagaaaacaaaaacacctacgactacatgaacgggcgggtggtgccgccatctctagtagacacctatgtgaacattggtgccaggtggtctctggatgccatggacaatgtcaacccattcaaccaccaccgtaacgctggcttgcgttaccgatccatgcttctgggtaacggacgttatgtgcctttccacatacaagtgcctcaaaaattcttcgctgttaaaaacctgctgcttctcccaggctcctacacttatgagtggaactttaggaaggatgtgaacatggttctacagagttccctcggtaacgacctgcgggtagatggcgccagcatcagtttcacgagcatcaacctctatgctacttttttccccatggctcacaacaccgcttccacccttgaagccatgctgcggaatgacaccaatgatcagtcattcaacgactacctatctgcagctaacatgctctaccccattcctgccaatgcaaccaatattcccatttccattccttctcgcaactgggcggctttcagaggctggtcatttaccagactgaaaaccaaagaaactccctctttggggtctggatttgacccctactttgtctattctggttctattccctacctggatggtaccttctacctgaaccacacttttaagaaggtttccatcatgtttgactcttcagtgagctggcctggaaatgacaggttactatctcctaacgaatttgaaataaagcgcactgtggatggcgaaggctacaacgtagcccaatgcaacatgaccaaagactggttcttggtacagatgctcgccaactacaacatcggctatcagggcttctacattccagaaggatacaaagatcgcatgtattcatttttcagaaacttccagcccatgagcaggcaggtggttgatgaggtcaattacaaagacttcaaggccgtcgccataccctaccaacacaacaactctggctttgtgggttacatggctccgaccatgcgccaaggtcaaccctatcccgctaactatccctatccactcattggaacaactgccgtaaatagtgttacgcagaaaaagttcttgtgtgacagaaccatgtggcgcataccgttctcgagcaacttcatgtctatgggggcccttacagacttgggacagaatatgctctatgccaactcagctcatgctctggacatgacctttgaggtggatcccatggatgagcccaccctgctttatcttctcttcgaagttttcgacgtggtcagagtgcatcagccacaccgcggcatcatcgaggcagtctacctgcgtacaccgttctcggccggtaacgctaccacgtaagaagcttcttgcttcttgcaaatagcagctgcaaccatggcctgcggatcccaaaacggctccagcgagcaagagctcagagccattgtccaagacctgggttgcggaccctattttttgggaacctacgataagcgcttcccggggttcatggcccccgataagctcgcctgtgccattgtaaatacggccggacgtgagacggggggagagcactggttggctttcggttggaacccacgttctaacacctgctacctttttgatccttttggattctcggatgatcgtctcaaacagatttaccagtttgaatatgagggtctcctgcgccgcagcgctcttgctaccaaggaccgctgtattacgctggaaaaatctacccagaccgtgcagggtccccgttctgccgcctgcggacttttctgctgcatgttccttcacgcctttgtgcactggcctgaccgtcccatggacggaaaccccaccatgaaattgctaactggagtgccaaacaacatgcttcattctcctaaagtccagcccaccctgtgtgacaatcaaaaagcactctaccattttcttaatacccattcgccttattttcgctcccatcgtacacacatcgaaagggccactgcgttcgaccgtatggatgttcaataatgactcatgtaaacaacgtgttcaataaacatcactttatttttttacatgtatcaaggctctgcattacttatttatttacaagtcgaatgggttctgacgagaatcagaatgacccgcaggcagtgatacgttgcggaactgatacttgggttgccacttgaattcgggaatcaccaacttgggaaccggtatatcgggcaggatgtcactccacagctttctggtcagctgcaaagctccaagcaggtcaggagccgaaatcttgaaatcacaattaggaccagtgctttgagcgcgagagttgcggtacaccggattgcagcactgaaacaccatcagcgacggatgtctcacgcttgccagcacggtgggatctgcaatcatgcccacatccagatcttcagcattggcaatgctgaacggggtcatcttgcaggtctgcctacccatggcgggcacccaattaggcttgtggttgcaatcgcagtgcagggggatcagtatcatcttggcctgatcctgtctgattcctggatacacggctctcatgaaagcatcatattgcttgaaagcctgctgggctttactaccctcggtataaaacatcccgcaggacctgctcgaaaactggttagctgcacagccggcatcattcacacagcagcgggcgtcattgttagctatttgcaccacacttctgccccagcggttttgggtgattttggttcgctcgggattctcctttaaggctcgttgtccgttctcgctggccacatccatctcgataatctgctccttctgaatcataatattgccatgcaggcacttcagcttgccctcataatcattgcagccatgaggccacaacgcacagcctgtacattcccaattatggtgggcgatctgagaaaaagaatgtatcattccctgcagaaatcttcccatcatcgtgctcagtgtcttgtgactagtgaaagttaactggatgcctcggtgctcctcgtttacgtactggtgacagatgcgcttgtattgttcgtgttgctcaggcattagtttaaaagaggttctaagttcgttatccagcctgtacttctccatcagcagacacatcacttccatgcctttctcccaagcagacaccaggggcaagctaatcggattcttaacagtgcaggcagcagctcctttagccagagggtcatctttagcgatcttctcaatgcttcttttgccatccttctcaacgatgcgcacgggcgggtagctgaaacccactgctacaagttgcgcctcttctctttcttcttcgctgtcttgactgatgtcttgcatggggatatgtttggtcttccttggcttctttttggggggtatcggaggaggaggactgtcgctccgttccggagacagggaggattgtgacgtttcgctcaccattaccaactgactgtcggtagaagaacctgaccccacacggcgacaggtgtttctcttcgggggcagaggtggaggcgattgcgaagggctgcggtccgacctggaaggcggatgactggcagaaccccttccgcgttcgggggtgtgctccctgtggcggtcgcttaactgatttccttcgcggctggccattgtgttctcctaggcagagaaacaacagacatggaaactcagccattgctgtcaacatcgccacgagtgccatcacatctcgtcctcagcgacgaggaaaaggagcagagcttaagcattccaccgcccagtcctgccaccacctctaccctagaagataaggaggtcgacgcatctcatgacatgcagaataaaaaagcgaaagagtctgagacagacatcgagcaagacccgggctatgtgacaccggtggaacacgaggaagagttgaaacgctttctagagagagaggatgaaaactgcccaaaacaacgagcagataactatcaccaagatgctggaaatagggatcagaacaccgactacctcatagggcttgacggggaagacgcgctccttaaacatctagcaagacagtcgctcatagtcaaggatgcattattggacagaactgaagtgcccatcagtgtggaagagctcagccgcgcctacgagcttaacctcttttcacctcgtactccccccaaacgtcagccaaacggcacctgcgagccaaatcctcgcttaaacttttatccagcttttgctgtgccagaagtactggctacctatcacatcttttttaaaaatcaaaaaattccagtctcctgccgcgctaatcgcacccgcgccgatgccctactcaatctgggacctggttcacgcttacctgatatagcttccttggaagaggttccaaagatcttcgagggtctgggcaataatgagactcgggccgcaaatgctctgcaaaagggagaaaatggcatggatgagcatcacagcgttctggtggaattggaaggcgataatgccagactcgcagtactcaagcgaagcatcgaggtcacacacttcgcatatcccgctgtcaacctgccccctaaagtcatgacggcggtcatggaccagttactcattaagcgcgcaagtcccctttcagaagacatgcatgacccagatgcctgtgatgagggtaaaccagtggtcagtgatgagcagctaacccgatggctgggcaccgactctcccagggatttggaagagcgtcgcaagcttatgatggccgtggtgctggttaccgtagaactagagtgtctccgacgtttctttaccgattcagaaaccttgcgcaaactcgaagagaatctgcactacacttttagacacggctttgtgcggcaggcatgcaagatatctaacgtggaactcaccaacctggtttcctacatgggtattctgcatgagaatcgcctaggacaaagcgtgctgcacagcaccctgaagggggaagcccgccgtgattacatccgcgattgtgtctatctgtacctgtgccacacgtggcaaaccggcatgggtgtatggcagcaatgtttagaagaacagaacttgaaagagcttgacaagctcttacagaaatctcttaaggttctgtggacagggttcgacgagcgcaccgtcgcttccgacctggcagacctcatcttcccagagcgtctcagggttactttgcgaaacggattgcctgactttatgagccagagcatgcttaacaattttcgctctttcatcctggaacgctccggtatcctgcccgccacctgctgcgcactgccctccgactttgtgcctctcacctaccgcgagtgccccccgccgctatggagtcactgctacctgttccgtctggccaactatctctcctaccactcggatgtgatcgaggatgtgagcggagacggcttgctggagtgtcactgccgctgcaatctgtgcacgccccaccggtccctagcttgcaacccccagttgatgagcgaaacccagataataggcacctttgaattgcaaggccccagcagccaaggcgatgggtcttctcctgggcaaagtttaaaactgaccccgggactgtggacctccgcctacttgcgcaagtttgctccggaagattaccacccctatgaaatcaagttctatgaggaccaatcacagcctccaaaggccgaactttcggcctgcgtcatcacccagggggcaattctggcccaattgcaagccatccaaaaatcccgccaagaatttctactgaaaaagggtaagggggtctaccttgacccccagaccggcgaggaactcaacacaaggttccctcaggatgtcccaacgacgagaaaacaagaagttgaaggtgcagccgccgcccccagaagatatggaggaagattgggacagtcaggcagaggaggcggaggaggacagtctggaggacagtctggaggaagacagtttggaggaggaaaacgaggaggcagaggaggtggaagaagtaaccgccgacaaacagttatcctcggctgcggagacaagcaacagcgctaccatctccgctccgagtcgaggaacccggcggcgtcccagcagtagatgggacgagaccggacgcttcccgaacccaaccagcgcttccaagaccggtaagaaggatcggcagggatacaagtcctggcgggggcataagaatgccatcatctcctgcttgcatgagtgcgggggcaacatatccttcacgcggcgctacttgctattccaccatggggtgaactttccgcgcaatgttttgcattactaccgtcacctccacagcccctactatagccagcaaatcccggcagtctcgacagataaagacagcggcggcgacctccaacagaaaaccagcagcggcagttagaaaatacacaacaagtgcagcaacaggaggattaaagattacagccaacgagccagcgcaaacccgagagttaagaaatcggatctttccaaccctgtatgccatcttccagcagagtcggggtcaagagcaggaactgaaaataaaaaaccgatctctgcgttcgctcaccagaagttgtttgtatcacaagagcgaagatcaacttcagcgcactctcgaggacgccgaggctctcttcaacaagtactgcgcgctgactcttaaagagtaggcagcgaccgcgcttattcaaaaaaggcgggaattacatcatcctcgacatgagtaaagaaattcccacgccttacatgtggagttatcaaccccaaatgggattggcggcaggcgcctcccaggactactccacccgcatgaattggctcagcgccgggccttctatgatttctcgagttaatgatatacgcgcctaccgaaaccaaatacttttggaacagtcagctcttaccaccacgccccgccaacaccttaatcccagaaattggcccgccgccctagtgtaccaggaaagtcccgctcccaccactgtattacttcctcgagacgcccaggccgaagtccaaatgactaatgcaggtgcgcagttagctggcggctccaccctatgtcgtcacaggcctcggcataatataaaacgcctgatgatcagaggccgaggtatccagctcaacgacgagtcggtgagctctccgcttggtctacgaccagacggaatctttcagattgccggctgcgggagatcttccttcacccctcgtcaggctgttctgactttggaaagttcgtcttcgcaaccccgctcgggcggaatcgggaccgttcaatttgtggaggagtttactccctctgtctacttcaaccccttctccggatctcctgggcattacccggacgagttcataccgaacttcgacgcgattagcgagtcagtggacggctacgattgatgtctggtgacgcggctgagctatctcggctgcgacatctagaccactgccgccgctttcgctgctttgcccgggaactcattgagttcatctacttcgaactccccaaggatcaccctcaaggtccggcccacggagtgcggatttctatcgaaggcaaaatagactctcgcctgcaacgaattttctcccagcggcccgtgctgatcgagcgagaccagggaaacaccacggtttccatctactgcatttgtaatcaccccggattgcatgaaagcctttgctgtcttatgtgtactgagtttaataaaaactgaattaagactctcctacggactgccgcttcttcaacccggattttacaaccagaagaacgaaacttttcctgtcgtccaggactctgttaacttcacctttcctactcacaaactagaagctcaacgactacaccgcttttccagaagcattttccctactaatactactttcaaaaccggaggtgagctccaaggtcttcctacagaaaacccttgggtggaagcgggccttgtagtgctaggaattcttgcgggtgggcttgtgattattctttgctacctatacacaccttgcttcactttcttagtggtgttgtggtattggtttaaaaaatggggcccatactagtcttgcttgttttactttcgcttttggaaccgggttctgccaattacgatccatgtctagacttcgacccagaaaactgcacacttacttttgcacccgacacaagccgcatctgtggagttcatcgcctctcttacgaacttggcccccaacgacaaaaatttacctgcatggtgggaatcaaccccatagttatcacccagcaaagtggagatactaagggttgcattcactgctcctgcgattccatcgagtgcacctacaccctgctgaagaccctatgcggcctaagagacctgctaccaatgaattaaaaaatgattaataaaaaatcacttacttgaaatcagcaataaggtctctgttgaaattttctcccagcagcacctcacttccctcttcccaactctggtattctaaaccccgttcagcggcatactttctccatactttaaaggggatgtcaaattttagctcctctcctgtacccacaatcttcatgtctttcttcccagatgaccaagagagtccggctcagtgactccttcaaccctgtctacccctatgaagatgaaagcacctcccaacacccctttataaacccagggtttatttccccaaatggcttcacacaaagcccaaacggagttcttactttaaaatgtttaaccccactaacaaccacaggcggatctctacagctaaaagtgggagggggacttacagtggatgacaccaacggttttttgaaagaaaacataagtgccaccacaccactcgttaagactggtcactctataggtttaccactaggagccggattgggaacgaatgaaaataaactttgtatcaaattaggacaaggacttacattcaattcaaacaacatttgcattgatgacaatattaacaccttatggacaggagtcaaccccaccgaagccaactgtcaaatcatgaactccagtgaatctaatgattgcaaattaattctaacactagttaaaactggagcactagtcactgcatttgtttatgttataggagtatctaacaattttaatatgctaactacacacagaaatataaattttactgcagagctgtttttcgattctactggtaatttactaactagactctcatccctcaaaactccacttaatcataaatcaggacaaaacatggctactggtgccattactaatgctaaaggtttcatgcccagcacgactgcctatcctttcaatgataattctagagaaaaagaaaactacatttacggaacttgttactacacagctagtgatcgcactgcttttcccattgacatatctgtcatgcttaaccgaagagcaataaatgacgagacatcatattgtattcgtataacttggtcctggaacacaggagatgccccagaggtgcaaacctctgctacaaccctagtcacctccccatttaccttttactacatcagagaagacgactgacaaataaagtttgcgatcgccaggcccaccatgggatggagctgtatcatcctcttcttggtagcaacagctacaggtgtccactcccaggtgcagctggtggagtctgggggaggcgtggtccagcctgggaggtccctgagactctcctgtgcagcgtctggattcaccttcagtagctatggcatgcactgggtccgccaggctccaggcaaggggctggagtgggtggcagttatatggtatgatggaagtaataaatactatgcagactccgtgaagggccgattcaccatctccagagacaattccaagaacacgctgtatctgcaaatgaacagcctgagagccgaggacacggctgtgtattactgtgcgagagatccgaggggagctaccctttactactactactacggtatggacgtctggggccaagggaccacggtcaccgtctcctcagcctccaccaagggcccatcggtcttccccctggcaccctcctccaagagcacctctgggggcacagcggccctgggctgcctggtcaaggactacttccccgaaccggtgacggtgtcgtggaactcaggcgccctgaccagcggcgtgcacaccttcccggctgtcctacagtcctcaggactctactccctcagcagcgtggtgaccgtgccctccagcagcttgggcacccagacctacatctgcaacgtgaatcacaagcccagcaacaccaaggtcgacaagaaagttgagcccaaatcttgtgacaaaactcacacatgcccaccgtgcccagcacctgagctcctggggggaccgtcagtcttcctcttccccccaaaacccaaggacaccctcatgatctcccggacccctgaggtcacatgcgtggtggtggacgtgagccacgaagaccctgaggtcaagttcaactggtacgtggacggcgtggaggtgcataatgccaagacaaagccgcgggaggagcagtacaacagcacgtaccgtgtggtcagcgtcctcaccgtcctgcaccaggactggctgaatggcaaggagtacaagtgcaaggtctccaacaaagccctcccagcccccatcgagaaaaccatctccaaagccaaagggcagccccgagaaccacaggtgtacaccctgcccccatcccgggaggagatgaccaagaaccaggtcagcctgacctgcctggtcaaaggcttctatcccagcgacatcgccgtggagtgggagagcaatgggcagccggagaacaactacaagaccacgcctcccgtgctggactccgacggctccttcttcctctacagcaagctcaccgtggacaagagcaggtggcagcaggggaacgtcttctcatgctccgtgatgcacgaggctctgcacaaccactacacgcagaagagcctctccctgtctccgggtaaatgatctagactcgaggtttctagaagttgtctcctcctgcactgactgactgacctaacgttactggccgaagccgcttggaataaggccggtgtgcgtttgtctatatgttattttccaccatattgccgtcttttggcaatgtgagggcccggaaacctggccctgtcttcttgacgagcattcctaggggtctttcccctctcgccaaaggaatgcaaggtctgttgaatgtcgtgaaggaagcagttcctctggaagcttcttgaagacaaacaacgtctgtagcgaccctttgcaggcagcggaaccccccacctggcgacaggtgcctctgcggccaaaagccacgtgtataagatacacctgcaaaggcggcacaaccccagtgccacgttgtgagttggatagttgtggaaagagtcaaatggctcccctcaagcgtattcaacaaggggctgaaggatgcccagaaggtaccccattgtatgggatctgatctggggcctcggtgcacatgcttttcatgtgtttagtcgaggttaaaaaacgtctaggccccccgaaccacggggacgtggttttcctttgaaaaacacgatgataataacatggactggacctggcgcgtgttttgcctgctcgccgtggctcctggggcccacagcgatatccagatgacccagtctccatcctccctgtctgcatctgtaggagacagagtcaccatcacttgccgggcaagtcagagcattaacagctatttagattggtatcagcagaaaccagggaaagcccctaaactcctgatctatgctgcatccagtttgcaaagtggggtcccatcaaggttcagtggcagtggatctgggacagatttcactctcaccatcagcagtctgcaacctgaagattttgcaacttactactgtcaacagtattacagtactccattcactttcggccctgggaccaaagtggaaatcaaacgaactgtggctgcaccatctgtcttcatcttcccgccatctgatgagcagttgaaatctggaactgcttctgttgtgtgcctgctgaataacttctatcccagagaggccaaagtacagtggaaggtggataacgccctccaatcgggtaactcccaggagagtgtcacagagcaggacagcaaggacagcacctacagcctcagcagcaccctgacgctgagcaaagcagactacgagaaacacaaagtctacgcctgcgaagtcacccatcagggcctgagctcgcccgtcacaaagagcttcaacaggggagagtgttaagctagcttgactgactgagatacagcgtaccttcagctcacagacatgataagatacattgatgagtttggacaaaccacaactagaatgcagtgaaaaaaatgctttatttgtgaaatttgtgatgctattgctttatttgtaaccattataagctgcaataaacaagttaacaacaacaattgcattcattttatgtttcaggttcagggggaggtgtgggaggttttttaaagcaagtaaaacctctacaaatgtggtagtcgtcagctatcctgcaggaacttgtttatttgaaaatcaattcacaaaatccgagtagttattttgcctcccccttcccatttaacagaatacaccaatctctccccacgcacagctttaaacatttggataccattagatatagacatggttttagattccacattccaaacagtttcagagcgagccaatctggggtcagtgatagataaaaatccatcgggatagtcttttaaagcgctttcacagtccaactgctgcggatgcgactccggagtctggatcacggtcatctggaagaagaacgatgggaatcataatccgaaaacggtatcggacgattgtgtctcatcaaacccacaagcagccgctgtctgcgtcgctccgtgcgactgctgtttatgggatcagggtccacagtgtcctgaagcatgattttaatagcccttaacatcaactttctggtgcgatgcgcgcagcaacgcattctgatttcactcaaatctttgcagtaggtacaacacattattacaatattgtttaataaaccataattaaaagcgctccagccaaaactcatatctgatataatcgcccctgcatgaccatcataccaaagtttaatataaattaaatgacgttccctcaaaaacacactacccacatacatgatctcttttggcatgtgcatattaacaatctgtctgtaccatggacaacgttggttaatcatgcaacccaatataaccttccggaaccacactgccaacaccgctcccccagccatgcattgaagtgaaccctgctgattacaatgacaatgaagaacccaattctctcgaccgtgaatcacttgagaatgaaaaatatctatagtggcacaacatagacataaatgcatgcatcttctcataatttttaactcctcaggatttagaaacatatcccagggaataggaagctcttgcagaacagtaaagctggcagaacaaggaagaccacgaacacaacttacactatgcatagtcatagtatcacaatctggcaacagcgggtggtcttcagtcatagaagctcgggtttcattttcctcacaacgtggtaactgggctctggtgtaagggtgatgtctggcgcatgatgtcgagcgtgcgcgcaaccttgtcataatggagttgcttcctgacattctcgtattttgtatagcaaaacgcggccctggcagaacacactcttcttcgccttctatcctgccgcttagcgtgttccgtgtgatagttcaagtacaaccacactcttaagttggtcaaaagaatgctggcttcagttgtaatcaaaactccatcgcatctaatcgttctgaggaaatcatccaagcaatgcaactggattgtgtttcaagcaggagaggagagggaagagacggaagaaccatgttaatttttattccaaacgatctcgcagtacttcaaattgtagatcgcgcagatggcatctctcgcccccactgtgttggtgaaaaagcacagctagatcaaaagaaatgcgattttcaaggtgctcaacggtggcttccagcaaagcctccacgcgcacatccaagaacaaaagaataccaaaagaaggagcattttctaactcctcaatcatcatattacattcctgcaccattcccagataattttcagctttccagccttgaattattcgtgtcagttcttgtggtaaatccaatccacacattacaaacaggtcccggagggcgccctccaccaccattcttaaacacaccctcataatgacaaaatatcttgctcctgtgtcacctgtagcgaattgagaatggcaacatcaattgacatgcccttggctctaagttcttctttaagttctagttgtaaaaactctctcatattatcaccaaactgcttagccagaagccccccgggaacaagagcaggggacgctacagtgcagtacaagcgcagacctccccaattggctccagcaaaaacaagattggaataagcatattgggaaccgccagtaatatcatcgaagttgctggaaatataatcaggcagagtttcttgtaaaaattgaataaaagaaaaatttgccaaaaaaacattcaaaacctctgggatgcaaatgcaataggttaccgcgctgcgctccaacattgttagttttgaattagtctgcaaaaataaaaaaaaaaacaagcgtcatatcatagtagcctgacgaacagatggataaatcagtctttccatcacaagacaagccacagggtctccagctcgaccctcgtaaaacctgtcatcatgattaaacaacagcaccgaaagttcctcgcggtgaccagcatgaataattcttgatgaagcatacaatccagacatgttagcatcagttaacgagaaaaaacagccaacatagcctttgggtataattatgcttaatcgtaagtatagcaaagccacccctcgcggatacaaagtaaaaggcacaggagaataaaaaatataattatttctctgctgctgttcaggcaacgtcgcccccggtccctctaaatacacatacaaagcctcatcagccatggcttaccagacaaagtacagcgggcacacaaagcacaagctctaaagtgactctccaacctctccacaatatatatatacacaagccctaaactgacgtaatgggagtaaagtgtaaaaaatcccgccaaacccaacacacaccccgaaactgcgtcaccagggaaaagtacagtttcacttccgcaatcccaacaggcgtaacttcctctttctcacggtacgtgatatcccactaacttgcaacgtcattttcccacggtcgcaccgccccttttagccgttaaccccacagccaatcaccacacgatccacactttttaaaatcacctcatttacatattggcaccattccatctataaggtatattatatagataga

SEQ ID NO: 59 - DNA, 34807 bp, Artificial Sequence
  NG-165 virus genome sequence consisting of a transgene cassette encoding an anti-VEGF full length antibody inserted into the region BY.
tctatctatataatataccttatagatggaatggtgccaatatgtaaatgaggtgattttaaaaagtgtggatcgtgtggtgattggctgtggggttaacggctaaaaggggcggtgcgaccgtgggaaaatgacgttttgtgggggtggagtttttttgcaagttgtcgcgggaaatgtgacgcataaaaaggcttttttctcacggaactacttagttttcccacggtatttaacaggaaatgaggtagttttgaccggatgcaagtgaaaattgttgattttcgcgcgaaaactgaatgaggaagtgtttttctgaataatgtggtatttatggcagggtggagtatttgttcagggccaggtagactttgacccattacgtggaggtttcgattaccgtgttttttacctgaatttccgcgtaccgtgtcaaagtcttctgtttttacgtaggtgtcagctgatcgctagggtatttatacctcagggtttgtgtcaagaggccactcttgagtgccagcgagaagagttttctcctctgcgccggcagtttaataataaaaaaatgagagatttgcgatttctgcctcaggaaataatctctgctgagactggaaatgaaatattggagcttgtggtgcacgccctgatgggagacgatccggagccacctgtgcagctttttgagcctcctacgcttcaggaactgtatgatttagaggtagagggatcggaggattctaatgaggaagctgtaaatggcttttttaccgattctatgcttttagctgctaatgaagggttagaattagatccgcctttggacacttttgatactccaggggtaattgtggaaagcggtacaggtgtaagaaaattacctgatttgagttccgtggactgtgatttgcactgctatgaagacgggtttcctccgagtgatgaggaggaccatgaaaaggagcagtccatgcagactgcagcgggtgagggagtgaaggctgccaatgttggttttcagttggattgcccggagcttcctggacatggctgtaagtcttgtgaatttcacaggaaaaatactggagtaaaggaactgttatgttcgctttgttatatgagaacgcactgccactttatttacagtaagtgtgtttaagttaaaatttaaaggaatatgctgtttttcacatgtatattgagtgtgagttttgtgcttcttattataggtcctgtgtctgatgctgatgaatcaccatctcctgattctactacctcacctcctgagattcaagcacctgttcctgtggacgtgcgcaagcccattcctgtgaagcttaagcctgggaaacgtccagcagtggaaaaacttgaggacttgttacagggtggggacggacctttggacttgagtacacggaaacgtccaagacaataagtgttccatatccgtgtttacttaaggtgacgtcaatatttgtgtgacagtgcaatgtaataaaaatatgttaactgttcactggtttttattgctttttgggcggggactcaggtatataagtagaagcagacctgtgtggttagctcataggagctggctttcatccatggaggtttgggccattttggaagaccttaggaagactaggcaactgttagagaacgcttcggacggagtctccggtttttggagattctggttcgctagtgaattagctagggtagtttttaggataaaacaggactataaacaagaatttgaaaagttgttggtagattgcccaggactttttgaagctcttaatttgggccatcaggttcactttaaagaaaaagttttatcagttttagacttttcaaccccaggtagaactgctgctgctgtggcttttcttacttttatattagataaatggatcccgcagactcatttcagcaggggatacgttttggatttcatagccacagcattgtggagaacatggaaggttcgcaagatgaggacaatcttaggttactggccagtgcagcctttgggtgtagcgggaatcctgaggcatccaccggtcatgccagcggttctggaggaggaacagcaagaggacaacccgagagccggcctggaccctccagtggaggaggcggagtagctgacttgtctcctgaactgcaacgggtgcttactggatctacgtccactggacgggataggggcgttaagagggagagggcatctagtggtactgatgctagatctgagttggctttaagtttaatgagtcgcagacgtcctgaaaccatttggtggcatgaggttcagaaagagggaagggatgaagtttctgtattgcaggagaaatattcactggaacaggtgaaaacatgttggttggagcctgaggatgattgggaggtggccattaaaaattatgccaagatagctttgaggcctgataaacagtataagattactagacggattaatatccggaatgcttgttacatatctggaaatggggctgaggtggtaatagatactcaagacaaggcagttattagatgctgcatgatggatatgtggcctggggtagtcggtatggaagcagtaacttttgtaaatgttaagtttaggggagatggttataatggaatagtgtttatggccaataccaaacttatattgcatggttgtagcttttttggtttcaacaatacctgtgtagatgcctggggacaggttagtgtacggggatgtagtttctatgcgtgttggattgccacagctggcagaaccaagagtcaattgtctctgaagaaatgcatatttcaaagatgtaacctgggcattctgaatgaaggcgaagcaagggtccgccactgcgcttctacagatactggatgttttattttgattaagggaaatgccagcgtaaagcataacatgatttgcggtgcttccgatgagaggccttatcaaatgctcacttgtgctggtgggcattgtaatatgctggctactgtgcatattgtttcccatcaacgcaaaaaatggcctgtttttgatcacaatgtgatgacgaagtgtaccatgcatgcaggtgggcgtagaggaatgtttatgccttaccagtgtaacatgaatcatgtgaaagtgttgttggaaccagatgccttttccagaatgagcctaacaggaatttttgacatgaacatgcaaatctggaagatcctgaggtatgatgatacgagatcgagggtacgcgcatgcgaatgcggaggcaagcatgccaggttccagccggtgtgtgtagatgtgactgaagatctcagaccggatcatttggttattgcccgcactggagcagagttcggatccagtggagaagaaactgactaaggtgagtattgggaaaactttggggtgggattttcagatggacagattgagtaaaaatttgttttttctgtcttgcagctgtcatgagtggaaacgcttcttttaaggggggagtcttcagcccttatctgacagggcgtctcccatcctgggcaggagttcgtcagaatgttatgggatctactgtggatggaagacccgtccaacccgccaattcttcaacgctgacctatgctactttaagttcttcacctttggacgcagctgcagctgccgccgccgcttctgttgccgctaacactgtgcttggaatgggttactatggaagcatcatggctaattccacttcctctaataacccttctaccctgactcaggacaagttacttgtccttttggcccagctggaggctttgacccaacgtctgggtgaactttctcagcaggtggtcgagttgcgagtacaaactgagtctgctgtcggcacggcaaagtctaaataaaaaaatcccagaatcaatgaataaataaacaagcttgttgttgatttaaaatcaagtgtttttatttcatttttcgcgcacggtatgccctagaccaccgatctctatcattgagaactcggtggattttttccaggatcctatagaggtgggattgaatgtttagatacatgggcattaggccgtctttggggtggagatagctccattgaagggattcatgctccggggtagtgttgtaaatcacccagtcataacaaggtcgcagtgcatggtgttgcacaatatcttttagaagtaggctgattgccacagataagcccttggtgtaggtgtttacaaaccggttgagctgggatgggtgcattcggggtgaaattatgtgcattttggattggatttttaagttggcaatattgccgccaagatcccgtcttgggttcatgttatgaaggaccaccaagacggtgtatccggtacatttaggaaatttatcgtgcagcttggatggaaaagcgtggaaaaatttggagacacccttgtgtcctccaagattttccatgcactcatccatgataatagcaatggggccgtgggcagcggcgcgggcaaacacgttccgtgggtctgacacatcatagttatgttcctgagttaaatcatcataagccattttaatgaatttggggcggagagtaccagattggggtatgaatgttccttcgggccccggagcatagttcccctcacagatttgcatttcccaagctttcagttccgagggtggaatcatgtccacctggggggctatgaaaaacaccgtttctggggcgggggtgattaattgtgatgatagcaaatttctgagcaattgagatttgccacatccggtggggccataaatgattccgattacgggttgcaggtggtagtttagggaacggcaactgccgtcttctcgaagcaagggggccacctcgttcatcatttcccttacatgcatattttcccgcaccaaatccattaggaggcgctctcctcctagtgatagaagttcttgtagtgaggaaaagtttttcagcggtttcagaccgtcagccatgggcattttggagagagtttgctgcaaaagttctagtctgttccacagttcagtgatgtgttctatggcatctcgatccagcagacctcctcgtttcgcgggtttggacggctcctggaatagggtatgagacgatgggcgtccagcgctgccagggttcggtccttccagggtctcagtgttcgagtcagggttgtttccgtcacagtgaaggggtgtgcgcctgcttgggcgcttgccagggtgcgcttcagactcatcctgctggtcgaaaacttctgtcgcttggcgccctgtatgtcggccaagtagcagtttaccatgagttcgtagttgagcgcctcggctgcgtggcctttggcgcggagcttacctttggaagttttcttgcataccgggcagtataggcatttcagcgcatacaacttgggcgcaaggaaaacggattctggggagtatgcatctgcgccgcaggaggcgcaaacagtttcacattccaccagccaggttaaatccggttcattggggtcaaaaacaagttttccgccatattttttgatgcgtttcttacctttggtctccatgagttcgtgtcctcgttgagtgacaaacaggctgtccgtgtccccgtagactgattttacaggcctcttctccagtggagtgcctcggtcttcttcgtacaggaactctgaccactctgatacaaaggcgcgcgtccaggccagcacaaaggaggctatgtgggaggggtagcgatcgttgtcaaccagggggtccaccttttccaaagtatgcaaacacatgtcaccctcttcaacatccaggaatgtgattggcttgtaggtgtatttcacgtgacctggggtccccgctgggggggtataaaagggggcggttctttgctcttcctcactgtcttccggatcgctgtccaggaacgtcagctgttggggtaggtattccctctcgaaggcgggcatgacctctgcactcaggttgtcagtttctaagaacgaggaggatttgatattgacagtgccggttgagatgcctttcatgaggttttcgtccatctggtcagaaaacacaatttttttattgtcaagtttggtggcaaatgatccatacagggcgttggataaaagtttggcaatggatcgcatggtttggttcttttccttgtccgcgcgctctttggcggcgatgttgagttggacatactcgcgtgccaggcacttccattcggggaagatagttgttaattcatctggcacgattctcacttgccaccctcgattatgcaaggtaattaaatccacactggtggccacctcgcctcgaaggggttcattggtccaacagagcctacctcctttcctagaacagaaagggggaagtgggtctagcataagttcatcgggagggtctgcatccatggtaaagattcccggaagtaaatccttatcaaaatagctgatgggagtggggtcatctaaggccatttgccattctcgagctgccagtgcgcgctcatatgggttaaggggactgccccatggcatgggatgggtgagtgcagaggcatacatgccacagatgtcatagacgtagatgggatcctcaaagatgcctatgtaggttggatagcatcgcccccctctgatacttgctcgcacatagtcatatagttcatgtgatggcgctagcagccccggacccaagttggtgcgattgggtttttctgttctgtagacgatctggcgaaagatggcgtgagaattggaagagatggtgggtctttgaaaaatgttgaaatgggcatgaggtagacctacagagtctctgacaaagtgggcataagattcttgaagcttggttaccagttcggcggtgacaagtacgtctagggcgcagtagtcaagtgtttcttgaatgatgtcataacctggttggtttttcttttcccacagttcgcggttgagaaggtattcttcgcgatccttccagtactcttctagcggaaacccgtctttgtctgcacggtaagatcctagcatgtagaactgattaactgccttgtaagggcagcagcccttctctacgggtagagagtatgcttgagcagcttttcgtagcgaagcgtgagtaagggcaaaggtgtctctgaccatgactttgaggaattggtatttgaagtcgatgtcgtcacaggctccctgttcccagagttggaagtctacccgtttcttgtaggcggggttgggcaaagcgaaagtaacatcattgaagagaatcttgccggccctgggcatgaaattgcgagtgatgcgaaaaggctgtggtacttccgctcggttattgataacctgggcagctaggacgatctcgtcgaaaccgttgatgttgtgtcctacgatgtataattctatgaaacgcggcgtgcctctgacgtgaggtagcttactgagctcatcaaaggttaggtctgtggggtcagataaggcgtagtgttcgagagcccattcgtgcaggtgaggattcgctttaaggaaggaggaccagaggtccactgccagtgctgtttgtaactggtcccggtactgacgaaaatgccgtccgactgccattttttctggggtgacgcaatagaaggtttgggggtcctgccgccagcgatcccacttgagttttatggcgaggtcataggcgatgttgacgagccgctggtctccagagagtttcatgaccagcatgaaggggattagctgcttgccaaaggaccccatccaggtgtaggtttccacatcgtaggtgagaaagagcctttctgtgcgaggatgagagccaatcgggaagaactggatctcctgccaccagttggaggaatggctgttgatgtgatggaagtagaactccctgcgacgcgccgagcattcatgcttgtgcttgtacagacggccgcagtagtcgcagcgttgcacgggttgtatctcgtgaatgagttgtacctggcttcccttgacgagaaatttcagtgggaagccgaggcctggcgattgtatctcgtgctttactatgttgtctgcatcggcctgttcatcttctgtctcgatggtggtcatgctgacgagccctcgcgggaggcaagtccagacctcggcgcggcaggggcggagctcgaggacgagagcgcgcaggctggagctgtccagggtcctgagacgctgcggactcaggttagtaggcagtgtcaggagattaacttgcatgatcttttggagggcgtgcgggaggttcagatagtacttgatctcaacgggtccgttggtggagatgtcgatggcttgcagggttccgtgtcccttgggcgctaccaccgtgcccttgtttttcattttggacggcggtggctctgttgcttcttgcatgtttagaagcggtgtcgagggcgcgcaccgggcggcaggggcggctcgggacccggcggcatggctggcagtggtacgtcggcgccgcgcgcgggtaggttctggtactgcgccctgagaagactcgcatgcgcgacgacgcggcggttgacatcctggatctgacgcctctgggtgaaagctaccggccccgtgagcttgaacctgaaagagagttcaacagaatcaatctcggtatcgttgacggcggcttgcctaaggatttcttgcacgtcaccagagttgtcctggtaggcgatctccgccatgaactgctcgatctcttcctcttgaagatctccgcggcccgctctctcgacggtggccgcgaggtcgttggagatgcgcccaatgagttgagagaatgcattcatgcccgcctcgttccagacgcggctgtagaccacggcccccacgggatctctcgcgcgcatgaccacctgggcgaggttgagctccacgtggcgggtgaagaccgcatagttgcataggcgctggaaaaggtagttgagtgtggtggcgatgtgctcggtgacgaagaaatacatgatccatcgtctcagcggcatctcgctgacatcgcccagagcttccaagcgctccatggcctcgtagaagtccacggcaaaattaaaaaactgggagtttcgcgcggacacggtcaactcctcttccagaagacggataagttcggcgatggtggtgcgcacctcgcgctcgaaagcccctgggatttcttcctcaatctcttcttcttccactaacatctcttcctcttcaggtggggctgcaggaggagggggaacgcggcgacgccggcggcgcacgggcagacggtcgatgaatctttcaatgacctctccgcggcggcggcgcatggtttcagtgacggcgcggccgttctcgcgcggtcgcagagtaaaaacaccgccgcgcatctccttaaagtggtgactgggaggttctccgtttgggagggagagggcgctgattatacattttattaattggcccgtagggactgcacgcagagatctgatcgtgtcaagatccacgggatctgaaaacctttcgacgaaagcgtctaaccagtcacagtcacaaggtaggctgagtacggcttcttgtgggcgggggtggttatgtgttcggtctgggtcttctgtttcttcttcatctcgggaaggtgagacgatgctgctggtgatgaaattaaagtaggcagttctaagacggcggatggtggcgaggagcaccaggtctttgggtccggcttgctggatacgcaggcgattggccattccccaagcattatcctgacatctagcaagatctttgtagtagtcttgcatgagccgttctacgggcacttcttcctcacccgttctgccatgcatacgtgtgagtccaaatccgcgcattggttgtaccagtgccaagtcagctacgactctttcggcgaggatggcttgctgtacttgggtaagggtggcttgaaagtcatcaaaatccacaaagcggtggtaagctcctgtattaatggtgtaagcacagttggccatgactgaccagttaactgtctggtgaccagggcgcacgagctcggtgtatttaaggcgcgaataggcgcgggtgtcaaagatgtaatcgttgcaggtgcgcaccagatactggtaccctataagaaaatgcggcggtggttggcggtagagaggccatcgttctgtagctggagcgccaggggcgaggtcttccaacataaggcggtgatagccgtagatgtacctggacatccaggtgattcctgcggcggtagtagaagcccgaggaaactcgcgtacgcggttccaaatgttgcgtagcggcatgaagtagttcattgtaggcacggtttgaccagtgaggcgcgcgcagtcattgatgctctatagacacggagaaaatgaaagcgttcagcgactcgactccgtagcctggaggaacgtgaacgggttgggtcgcggtgtaccccggttcgagacttgtactcgagccggccggagccgcggctaacgtggtattggcactcccgtctcgacccagcctacaaaaatccaggatacggaatcgagtcgttttgctggtttccgaatggcagggaagtgagtcctattttttttttttgccgctcagatgcatcccgtgctgcgacagatgcgcccccaacaacagcccccctcgcagcagcagcagcagcaatcacaaaaggctgtccctgcaactactgcaactgccgccgtgagcggtgcgggacagcccgcctatgatctggacttggaagagggcgaaggactggcacgtctaggtgcgccttcacccgagcggcatccgcgagttcaactgaaaaaagattctcgcgaggcgtatgtgccccaacagaacctatttagagacagaagcggcgaggagccggaggagatgcgagcttcccgctttaacgcgggtcgtgagctgcgtcacggtttggaccgaagacgagtgttgcgggacgaggatttcgaagttgatgaaatgacagggatcagtcctgccagggcacacgtggctgcagccaaccttgtatcggcttacgagcagacagtaaaggaagagcgtaacttccaaaagtcttttaataatcatgtgcgaaccctgattgcccgcgaagaagttacccttggtttgatgcatttgtgggatttgatggaagctatcattcagaaccctactagcaaacctctgaccgcccagctgtttctggtggtgcaacacagcagagacaatgaggctttcagagaggcgctgctgaacatcaccgaacccgaggggagatggttgtatgatcttatcaacattctacagagtatcatagtgcaggagcggagcctgggcctggccgagaaggtggctgccatcaattactcggttttgagcttgggaaaatattacgctcgcaaaatctacaagactccatacgttcccatagacaaggaggtgaagatagatgggttctacatgcgcatgacgctcaaggtcttgaccctgagcgatgatcttggggtgtatcgcaatgacagaatgcatcgcgcggttagcgccagcaggaggcgcgagttaagcgacagggaactgatgcacagtttgcaaagagctctgactggagctggaaccgagggtgagaattacttcgacatgggagctgacttgcagtggcagcctagtcgcagggctctgagcgccgcgacggcaggatgtgagcttccttacatagaagaggcggatgaaggcgaggaggaagagggcgagtacttggaagactgatggcacaacccgtgttttttgctagatggaacagcaagcaccggatcccgcaatgcgggcggcgctgcagagccagccgtccggcattaactcctcggacgattggacccaggccatgcaacgtatcatggcgttgacgactcgcaaccccgaagcctttagacagcaaccccaggccaaccgtctatcggccatcatggaagctgtagtgccttcccgctctaatcccactcatgagaaggtcctggccatcgtgaacgcgttggtggagaacaaagctattcgtccagatgaggccggactggtatacaacgctctcttagaacgcgtggctcgctacaacagtagcaatgtgcaaaccaatttggaccgtatgataacagatgtacgcgaagccgtgtctcagcgcgaaaggttccagcgtgatgccaacctgggttcgctggtggcgttaaatgctttcttgagtactcagcctgctaatgtgccgcgtggtcaacaggattatactaactttttaagtgctttgagactgatggtatcagaagtacctcagagcgaagtgtatcagtccggtcctgattacttctttcagactagcagacagggcttgcagacggtaaatctgagccaagcttttaaaaaccttaaaggtttgtggggagtgcatgccccggtaggagaaagagcaaccgtgtctagcttgttaactccgaactcccgcctattattactgttggtagctcctttcaccgacagcggtagcatcgaccgtaattcctatttgggttacctactaaacctgtatcgcgaagccatagggcaaagtcaggtggacgagcagacctatcaagaaattacccaagtcagtcgcgctttgggacaggaagacactggcagtttggaagccactctgaacttcttgcttaccaatcggtctcaaaagatccctcctcaatatgctcttactgcggaggaggagaggatccttagatatgtgcagcagagcgtgggattgtttctgatgcaagagggggcaactccgactgcagcactggacatgacagcgcgaaatatggagcccagcatgtatgccagtaaccgacctttcattaacaaactgctggactacttgcacagagctgccgctatgaactctgattatttcaccaatgccatcttaaacccgcactggctgcccccacctggtttctacacgggcgaatatgacatgcccgaccctaatgacggatttctgtgggacgacgtggacagcgatgttttttcacctctttctgatcatcgcacgtggaaaaaggaaggcggcgatagaatgcattcttctgcatcgctgtccggggtcatgggtgctaccgcggctgagcccgagtctgcaagtccttttcctagtctacccttttctctacacagtgtacgtagcagcgaagtgggtagaataagtcgcccgagtttaatgggcgaagaggagtatctaaacgattccttgctcagaccggcaagagaaaaaaatttcccaaacaatggaatagaaagtttggtggataaaatgagtagatggaagacttatgctcaggatcacagagacgagcctgggatcatggggattacaagtagagcgagccgtagacgccagcgccatgacagacagaggggtcttgtgtgggacgatgaggattcggccgatgatagcagcgtgctggacttgggtgggagaggaaggggcaacccgtttgctcatttgcgccctcgcttgggtggtatgttgtaaaaaaaaataaaaaaaaaactcaccaaggccatggcgacgagcgtacgttcgttcttctttattatctgtgtctagtataatgaggcgagtcgtgctaggcggagcggtggtgtatccggagggtcctcctccttcgtacgagagcgtgatgcagcagcagcaggcgacggcggtgatgcaatccccactggaggctccctttgtgcctccgcgatacctggcacctacggagggcagaaacagcattcgttattcggaactggcacctcagtacgataccaccaggttgtatctggtggacaacaagtcggcggacattgcttctctgaactatcagaatgaccacagcaacttcttgaccacggtggtgcaaaacaatgactttacccctacggaagccagcacccagaccattaactttgatgaacgatcgcggtggggcggtcagctaaagaccatcatgcatactaacatgccaaacgtgaacgagtatatgtttagtaacaagttcaaagcgcgtgtgatggtgtccagaaaacctcccgacggtgctgcagttggggatacttatgatcacaagcaggatattttgaaatatgagtggttcgagtttactttgccagaaggcaacttttcagttactatgactattgatttgatgaacaatgccatcatagataattacttgaaagtgggtagacagaatggagtgcttgaaagtgacattggtgttaagttcgacaccaggaacttcaagctgggatgggatcccgaaaccaagttgatcatgcctggagtgtatacgtatgaagccttccatcctgacattgtcttactgcctggctgcggagtggattttaccgagagtcgtttgagcaaccttcttggtatcagaaaaaaacagccatttcaagagggttttaagattttgtatgaagatttagaaggtggtaatattccggccctcttggatgtagatgcctatgagaacagtaagaaagaacaaaaagccaaaatagaagctgctacagctgctgcagaagctaaggcaaacatagttgccagcgactctacaagggttgctaacgctggagaggtcagaggagacaattttgcgccaacacctgttccgactgcagaatcattattggccgatgtgtctgaaggaacggacgtgaaactcactattcaacctgtagaaaaagatagtaagaatagaagctataatgtgttggaagacaaaatcaacacagcctatcgcagttggtatctttcgtacaattatggcgatcccgaaaaaggagtgcgttcctggacattgctcaccacctcagatgtcacctgcggagcagagcaggtctactggtcgcttccagacatgatgaaggatcctgtcactttccgctccactagacaagtcagtaactaccctgtggtgggtgcagagcttatgcccgtcttctcaaagagcttctacaacgaacaagctgtgtactcccagcagctccgccagtccacctcgcttacgcacgtcttcaaccgctttcctgagaaccagattttaatccgtccgccggcgcccaccattaccaccgtcagtgaaaacgttcctgctctcacagatcacgggaccctgccgttgcgcagcagtatccggggagtccaacgtgtgaccgttactgacgccagacgccgcacctgtccctacgtgtacaaggcactgggcatagtcgcaccgcgcgtcctttcaagccgcactttctaaaaaaaaaaaaaatgtccattcttatctcgcccagtaataacaccggttggggtctgcgcgctccaagcaagatgtacggaggcgcacgcaaacgttctacccaacatcctgtccgtgttcgcggacattttcgcgctccatggggcgccctcaagggccgcactcgcgttcgaaccaccgtcgatgatgtaatcgatcaggtggttgccgacgcccgtaattatactcctactgcgcctacatctactgtggatgcagttattgacagtgtagtggctgacgctcgcaactatgctcgacgtaagagccggcgaaggcgcattgccagacgccaccgagctaccactgccatgcgagccgcaagagctctgctacgaagagctagacgcgtggggcgaagagccatgcttagggcggccagacgtgcagcttcgggcgccagcgccggcaggtcccgcaggcaagcagccgctgtcgcagcggcgactattgccgacatggcccaatcgcgaagaggcaatgtatactgggtgcgtgacgctgccaccggtcaacgtgtacccgtgcgcacccgtccccctcgcacttagaagatactgagcagtctccgatgttgtgtcccagcggcgaggatgtccaagcgcaaatacaaggaagaaatgctgcaggttatcgcacctgaagtctacggccaaccgttgaaggatgaaaaaaaaccccgcaaaatcaagcgggttaaaaaggacaaaaaagaagaggaagatggcgatgatgggctggcggagtttgtgcgcgagtttgccccacggcgacgcgtgcaatggcgtgggcgcaaagttcgacatgtgttgagacctggaacttcggtggtctttacacccggcgagcgttcaagcgctacttttaagcgttcctatgatgaggtgtacggggatgatgatattcttgagcaggcggctgaccgattaggcgagtttgcttatggcaagcgtagtagaataacttccaaggatgagacagtgtcgatacccttggatcatggaaatcccacccctagtcttaaaccggtcactttgcagcaagtgttacccgtaactccgcgaacaggtgttaaacgcgaaggtgaagatttgtatcccactatgcaactgatggtacccaaacgccagaagttggaggacgttttggagaaagtaaaagtggatccagatattcaacctgaggttaaagtgagacccattaagcaggtagcgcctggtctgggggtacaaactgtagacattaagattcccactgaaagtatggaagtgcaaactgaacccgcaaagcctactgccacctccactgaagtgcaaacggatccatggatgcccatgcctattacaactgacgccgccggtcccactcgaagatcccgacgaaagtacggtccagcaagtctgttgatgcccaattatgttgtacacccatctattattcctactcctggttaccgaggcactcgctactatcgcagccgaaacagtacctcccgccgtcgccgcaagacacctgcaaatcgcagtcgtcgccgtagacgcacaagcaaaccgactcccggcgccctggtgcggcaagtgtaccgcaatggtagtgcggaacctttgacactgccgcgtgcgcgttaccatccgagtatcatcacttaatcaatgttgccgctgcctccttgcagatatggccctcacttgtcgccttcgcgttcccatcactggttaccgaggaagaaactcgcgccgtagaagagggatgttgggacgcggaatgcgacgctacaggcgacggcgtgctatccgcaagcaattgcggggtggttttttaccagccttaattccaattatcgctgctgcaattggcgcgataccaggcatagcttccgtggcggttcaggcctcgcaacgacattgacattggaaaaaaacgtataaataaaaaaaaaaaaatacaatggactctgacactcctggtcctgtgactatgttttcttagagatggaagacatcaatttttcatccttggctccgcgacacggcacgaagccgtacatgggcacctggagcgacatcggcacgagccaactgaacgggggcgccttcaattggagcagtatctggagcgggcttaaaaattttggctcaaccataaaaacatacgggaacaaagcttggaacagcagtacaggacaggcgcttagaaataaacttaaagaccagaacttccaacaaaaagtagtcgatgggatagcttccggcatcaatggagtggtagatttggctaaccaggctgtgcagaaaaagataaacagtcgtttggacccgccgccagcaaccccaggtgaaatgcaagtggaggaagaaattcctccgccagaaaaacgaggcgacaagcgtccgcgtcccgatttggaagagacgctggtgacgcgcgtagatgaaccgccttcttatgaggaagcaacgaagcttggaatgcccaccactagaccgatagccccaatggccaccggggtgatgaaaccttctcagttgcatcgacccgtcaccttggatttgccccctccccctgctgctactgctgtacccgcttctaagcctgtcgctgccccgaaaccagtcgccgtagccaggtcacgtcccgggggcgctcctcgtccaaatgcgcactggcaaaatactctgaacagcatcgtgggtctaggcgtgcaaagtgtaaaacgccgtcgctgcttttaattaaatatggagtagcgcttaacttgcctatctgtgtatatgtgtcattacacgccgtcacagcagcagaggaaaaaaggaagaggtcgtgcgtcgacgctgagttactttcaagatggccaccccatcgatgctgccccaatgggcatacatgcacatcgccggacaggatgcttcggagtacctgagtccgggtctggtgcagttcgcccgcgccacagacacctacttcaatctgggaaataagtttagaaatcccaccgtagcgccgacccacgatgtgaccaccgaccgtagccagcggctcatgttgcgcttcgtgcccgttgaccgggaggacaatacatactcttacaaagtgcggtacaccctggccgtgggcgacaacagagtgctggatatggccagcacgttctttgacattaggggtgtgttggacagaggtcccagtttcaaaccctattctggtacggcttacaactccctggctcctaaaggcgctccaaatacatctcagtggattgcagaaggtgtaaaaaatacaactggtgaggaacacgtaacagaagaggaaaccaatactactacttacacttttggcaatgctcctgtaaaagctgaagctgaaattacaaaagaaggactcccagtaggtttggaagtttcagatgaagaaagtaaaccgatttatgctgataaaacatatcagccagaacctcagctgggagatgaaacttggactgaccttgatggaaaaaccgaaaagtatggaggcagggctctcaaacccgatactaagatgaaaccatgctacgggtcctttgccaaacctactaatgtgaaaggcggtcaggcaaaacaaaaaacaacggagcagccaaatcagaaagtcgaatatgatatcgacatggagttttttgatgcggcatcgcagaaaacaaacttaagtcctaaaattgtcatgtatgcagaaaatgtaaatttggaaactccagacactcatgtagtgtacaaacctggaacagaagacacaagttccgaagctaatttgggacaacaatctatgcccaacagacccaactacattggcttcagagataactttattggacttatgtactataacagtactggtaacatgggggtgctggctggtcaagcgtctcagttaaatgcagtggttgacttgcaggacagaaacacagaactttcttaccaactcttgcttgactctctgggcgacagaaccagatactttagcatgtggaatcaggctgtggacagttatgatcctgatgtacgtgttattgaaaatcatggtgtggaagatgaacttcccaactactgttttccactggacggcataggtgttccaacaaccagttacaaatcaatagttccaaatggagacaatgcgcctaattggaaggaacctgaagtaaatggaacaagtgagatcggacagggtaatttgtttgccatggaaattaaccttcaagccaatctatggcgaagtttcctttattccaatgtggctctatatctcccagactcgtacaaatacaccccgtccaatgtcactcttccagaaaacaaaaacacctacgactacatgaacgggcgggtggtgccgccatctctagtagacacctatgtgaacattggtgccaggtggtctctggatgccatggacaatgtcaacccattcaaccaccaccgtaacgctggcttgcgttaccgatccatgcttctgggtaacggacgttatgtgcctttccacatacaagtgcctcaaaaattcttcgctgttaaaaacctgctgcttctcccaggctcctacacttatgagtggaactttaggaaggatgtgaacatggttctacagagttccctcggtaacgacctgcgggtagatggcgccagcatcagtttcacgagcatcaacctctatgctacttttttccccatggctcacaacaccgcttccacccttgaagccatgctgcggaatgacaccaatgatcagtcattcaacgactacctatctgcagctaacatgctctaccccattcctgccaatgcaaccaatattcccatttccattccttctcgcaactgggcggctttcagaggctggtcatttaccagactgaaaaccaaagaaactccctctttggggtctggatttgacccctactttgtctattctggttctattccctacctggatggtaccttctacctgaaccacacttttaagaaggtttccatcatgtttgactcttcagtgagctggcctggaaatgacaggttactatctcctaacgaatttgaaataaagcgcactgtggatggcgaaggctacaacgtagcccaatgcaacatgaccaaagactggttcttggtacagatgctcgccaactacaacatcggctatcagggcttctacattccagaaggatacaaagatcgcatgtattcatttttcagaaacttccagcccatgagcaggcaggtggttgatgaggtcaattacaaagacttcaaggccgtcgccataccctaccaacacaacaactctggctttgtgggttacatggctccgaccatgcgccaaggtcaaccctatcccgctaactatccctatccactcattggaacaactgccgtaaatagtgttacgcagaaaaagttcttgtgtgacagaaccatgtggcgcataccgttctcgagcaacttcatgtctatgggggcccttacagacttgggacagaatatgctctatgccaactcagctcatgctctggacatgacctttgaggtggatcccatggatgagcccaccctgctttatcttctcttcgaagttttcgacgtggtcagagtgcatcagccacaccgcggcatcatcgaggcagtctacctgcgtacaccgttctcggccggtaacgctaccacgtaagaagcttcttgcttcttgcaaatagcagctgcaaccatggcctgcggatcccaaaacggctccagcgagcaagagctcagagccattgtccaagacctgggttgcggaccctattttttgggaacctacgataagcgcttcccggggttcatggcccccgataagctcgcctgtgccattgtaaatacggccggacgtgagacggggggagagcactggttggctttcggttggaacccacgttctaacacctgctacctttttgatccttttggattctcggatgatcgtctcaaacagatttaccagtttgaatatgagggtctcctgcgccgcagcgctcttgctaccaaggaccgctgtattacgctggaaaaatctacccagaccgtgcagggtccccgttctgccgcctgcggacttttctgctgcatgttccttcacgcctttgtgcactggcctgaccgtcccatggacggaaaccccaccatgaaattgctaactggagtgccaaacaacatgcttcattctcctaaagtccagcccaccctgtgtgacaatcaaaaagcactctaccattttcttaatacccattcgccttattttcgctcccatcgtacacacatcgaaagggccactgcgttcgaccgtatggatgttcaataatgactcatgtaaacaacgtgttcaataaacatcactttatttttttacatgtatcaaggctctgcattacttatttatttacaagtcgaatgggttctgacgagaatcagaatgacccgcaggcagtgatacgttgcggaactgatacttgggttgccacttgaattcgggaatcaccaacttgggaaccggtatatcgggcaggatgtcactccacagctttctggtcagctgcaaagctccaagcaggtcaggagccgaaatcttgaaatcacaattaggaccagtgctttgagcgcgagagttgcggtacaccggattgcagcactgaaacaccatcagcgacggatgtctcacgcttgccagcacggtgggatctgcaatcatgcccacatccagatcttcagcattggcaatgctgaacggggtcatcttgcaggtctgcctacccatggcgggcacccaattaggcttgtggttgcaatcgcagtgcagggggatcagtatcatcttggcctgatcctgtctgattcctggatacacggctctcatgaaagcatcatattgcttgaaagcctgctgggctttactaccctcggtataaaacatcccgcaggacctgctcgaaaactggttagctgcacagccggcatcattcacacagcagcgggcgtcattgttagctatttgcaccacacttctgccccagcggttttgggtgattttggttcgctcgggattctcctttaaggctcgttgtccgttctcgctggccacatccatctcgataatctgctccttctgaatcataatattgccatgcaggcacttcagcttgccctcataatcattgcagccatgaggccacaacgcacagcctgtacattcccaattatggtgggcgatctgagaaaaagaatgtatcattccctgcagaaatcttcccatcatcgtgctcagtgtcttgtgactagtgaaagttaactggatgcctcggtgctcctcgtttacgtactggtgacagatgcgcttgtattgttcgtgttgctcaggcattagtttaaaagaggttctaagttcgttatccagcctgtacttctccatcagcagacacatcacttccatgcctttctcccaagcagacaccaggggcaagctaatcggattcttaacagtgcaggcagcagctcctttagccagagggtcatctttagcgatcttctcaatgcttcttttgccatccttctcaacgatgcgcacgggcgggtagctgaaacccactgctacaagttgcgcctcttctctttcttcttcgctgtcttgactgatgtcttgcatggggatatgtttggtcttccttggcttctttttggggggtatcggaggaggaggactgtcgctccgttccggagacagggaggattgtgacgtttcgctcaccattaccaactgactgtcggtagaagaacctgaccccacacggcgacaggtgtttctcttcgggggcagaggtggaggcgattgcgaagggctgcggtccgacctggaaggcggatgactggcagaaccccttccgcgttcgggggtgtgctccctgtggcggtcgcttaactgatttccttcgcggctggccattgtgttctcctaggcagagaaacaacagacatggaaactcagccattgctgtcaacatcgccacgagtgccatcacatctcgtcctcagcgacgaggaaaaggagcagagcttaagcattccaccgcccagtcctgccaccacctctaccctagaagataaggaggtcgacgcatctcatgacatgcagaataaaaaagcgaaagagtctgagacagacatcgagcaagacccgggctatgtgacaccggtggaacacgaggaagagttgaaacgctttctagagagagaggatgaaaactgcccaaaacaacgagcagataactatcaccaagatgctggaaatagggatcagaacaccgactacctcatagggcttgacggggaagacgcgctccttaaacatctagcaagacagtcgctcatagtcaaggatgcattattggacagaactgaagtgcccatcagtgtggaagagctcagccgcgcctacgagcttaacctcttttcacctcgtactccccccaaacgtcagccaaacggcacctgcgagccaaatcctcgcttaaacttttatccagcttttgctgtgccagaagtactggctacctatcacatcttttttaaaaatcaaaaaattccagtctcctgccgcgctaatcgcacccgcgccgatgccctactcaatctgggacctggttcacgcttacctgatatagcttccttggaagaggttccaaagatcttcgagggtctgggcaataatgagactcgggccgcaaatgctctgcaaaagggagaaaatggcatggatgagcatcacagcgttctggtggaattggaaggcgataatgccagactcgcagtactcaagcgaagcatcgaggtcacacacttcgcatatcccgctgtcaacctgccccctaaagtcatgacggcggtcatggaccagttactcattaagcgcgcaagtcccctttcagaagacatgcatgacccagatgcctgtgatgagggtaaaccagtggtcagtgatgagcagctaacccgatggctgggcaccgactctcccagggatttggaagagcgtcgcaagcttatgatggccgtggtgctggttaccgtagaactagagtgtctccgacgtttctttaccgattcagaaaccttgcgcaaactcgaagagaatctgcactacacttttagacacggctttgtgcggcaggcatgcaagatatctaacgtggaactcaccaacctggtttcctacatgggtattctgcatgagaatcgcctaggacaaagcgtgctgcacagcaccctgaagggggaagcccgccgtgattacatccgcgattgtgtctatctgtacctgtgccacacgtggcaaaccggcatgggtgtatggcagcaatgtttagaagaacagaacttgaaagagcttgacaagctcttacagaaatctcttaaggttctgtggacagggttcgacgagcgcaccgtcgcttccgacctggcagacctcatcttcccagagcgtctcagggttactttgcgaaacggattgcctgactttatgagccagagcatgcttaacaattttcgctctttcatcctggaacgctccggtatcctgcccgccacctgctgcgcactgccctccgactttgtgcctctcacctaccgcgagtgccccccgccgctatggagtcactgctacctgttccgtctggccaactatctctcctaccactcggatgtgatcgaggatgtgagcggagacggcttgctggagtgtcactgccgctgcaatctgtgcacgccccaccggtccctagcttgcaacccccagttgatgagcgaaacccagataataggcacctttgaattgcaaggccccagcagccaaggcgatgggtcttctcctgggcaaagtttaaaactgaccccgggactgtggacctccgcctacttgcgcaagtttgctccggaagattaccacccctatgaaatcaagttctatgaggaccaatcacagcctccaaaggccgaactttcggcctgcgtcatcacccagggggcaattctggcccaattgcaagccatccaaaaatcccgccaagaatttctactgaaaaagggtaagggggtctaccttgacccccagaccggcgaggaactcaacacaaggttccctcaggatgtcccaacgacgagaaaacaagaagttgaaggtgcagccgccgcccccagaagatatggaggaagattgggacagtcaggcagaggaggcggaggaggacagtctggaggacagtctggaggaagacagtttggaggaggaaaacgaggaggcagaggaggtggaagaagtaaccgccgacaaacagttatcctcggctgcggagacaagcaacagcgctaccatctccgctccgagtcgaggaacccggcggcgtcccagcagtagatgggacgagaccggacgcttcccgaacccaaccagcgcttccaagaccggtaagaaggatcggcagggatacaagtcctggcgggggcataagaatgccatcatctcctgcttgcatgagtgcgggggcaacatatccttcacgcggcgctacttgctattccaccatggggtgaactttccgcgcaatgttttgcattactaccgtcacctccacagcccctactatagccagcaaatcccggcagtctcgacagataaagacagcggcggcgacctccaacagaaaaccagcagcggcagttagaaaatacacaacaagtgcagcaacaggaggattaaagattacagccaacgagccagcgcaaacccgagagttaagaaatcggatctttccaaccctgtatgccatcttccagcagagtcggggtcaagagcaggaactgaaaataaaaaaccgatctctgcgttcgctcaccagaagttgtttgtatcacaagagcgaagatcaacttcagcgcactctcgaggacgccgaggctctcttcaacaagtactgcgcgctgactcttaaagagtaggcagcgaccgcgcttattcaaaaaaggcgggaattacatcatcctcgacatgagtaaagaaattcccacgccttacatgtggagttatcaaccccaaatgggattggcggcaggcgcctcccaggactactccacccgcatgaattggctcagcgccgggccttctatgatttctcgagttaatgatatacgcgcctaccgaaaccaaatacttttggaacagtcagctcttaccaccacgccccgccaacaccttaatcccagaaattggcccgccgccctagtgtaccaggaaagtcccgctcccaccactgtattacttcctcgagacgcccaggccgaagtccaaatgactaatgcaggtgcgcagttagctggcggctccaccctatgtcgtcacaggcctcggcataatataaaacgcctgatgatcagaggccgaggtatccagctcaacgacgagtcggtgagctctccgcttggtctacgaccagacggaatctttcagattgccggctgcgggagatcttccttcacccctcgtcaggctgttctgactttggaaagttcgtcttcgcaaccccgctcgggcggaatcgggaccgttcaatttgtggaggagtttactccctctgtctacttcaaccccttctccggatctcctgggcattacccggacgagttcataccgaacttcgacgcgattagcgagtcagtggacggctacgattgatgtctggtgacgcggctgagctatctcggctgcgacatctagaccactgccgccgctttcgctgctttgcccgggaactcattgagttcatctacttcgaactccccaaggatcaccctcaaggtccggcccacggagtgcggatttctatcgaaggcaaaatagactctcgcctgcaacgaattttctcccagcggcccgtgctgatcgagcgagaccagggaaacaccacggtttccatctactgcatttgtaatcaccccggattgcatgaaagcctttgctgtcttatgtgtactgagtttaataaaaactgaattaagactctcctacggactgccgcttcttcaacccggattttacaaccagaagaacgaaacttttcctgtcgtccaggactctgttaacttcacctttcctactcacaaactagaagctcaacgactacaccgcttttccagaagcattttccctactaatactactttcaaaaccggaggtgagctccaaggtcttcctacagaaaacccttgggtggaagcgggccttgtagtgctaggaattcttgcgggtgggcttgtgattattctttgctacctatacacaccttgcttcactttcttagtggtgttgtggtattggtttaaaaaatggggcccatactagtcttgcttgttttactttcgcttttggaaccgggttctgccaattacgatccatgtctagacttcgacccagaaaactgcacacttacttttgcacccgacacaagccgcatctgtggagttcatcgcctctcttacgaacttggcccccaacgacaaaaatttacctgcatggtgggaatcaaccccatagttatcacccagcaaagtggagatactaagggttgcattcactgctcctgcgattccatcgagtgcacctacaccctgctgaagaccctatgcggcctaagagacctgctaccaatgaattaaaaaatgattaataaaaaatcacttacttgaaatcagcaataaggtctctgttgaaattttctcccagcagcacctcacttccctcttcccaactctggtattctaaaccccgttcagcggcatactttctccatactttaaaggggatgtcaaattttagctcctctcctgtacccacaatcttcatgtctttcttcccagatgaccaagagagtccggctcagtgactccttcaaccctgtctacccctatgaagatgaaagcacctcccaacacccctttataaacccagggtttatttccccaaatggcttcacacaaagcccaaacggagttcttactttaaaatgtttaaccccactaacaaccacaggcggatctctacagctaaaagtgggagggggacttacagtggatgacaccaacggttttttgaaagaaaacataagtgccaccacaccactcgttaagactggtcactctataggtttaccactaggagccggattgggaacgaatgaaaataaactttgtatcaaattaggacaaggacttacattcaattcaaacaacatttgcattgatgacaatattaacaccttatggacaggagtcaaccccaccgaagccaactgtcaaatcatgaactccagtgaatctaatgattgcaaattaattctaacactagttaaaactggagcactagtcactgcatttgtttatgttataggagtatctaacaattttaatatgctaactacacacagaaatataaattttactgcagagctgtttttcgattctactggtaatttactaactagactctcatccctcaaaactccacttaatcataaatcaggacaaaacatggctactggtgccattactaatgctaaaggtttcatgcccagcacgactgcctatcctttcaatgataattctagagaaaaagaaaactacatttacggaacttgttactacacagctagtgatcgcactgcttttcccattgacatatctgtcatgcttaaccgaagagcaataaatgacgagacatcatattgtattcgtataacttggtcctggaacacaggagatgccccagaggtgcaaacctctgctacaaccctagtcacctccccatttaccttttactacatcagagaagacgactgacaaataaagtttgcgatcgccaggcccaccatgggatggagctgtatcatcctcttcttggtagcaacagctacaggtgtccactccgaggttcagctggtggagtctggcggtggcctggtgcagccagggggctcactccgtttgtcctgtgcagcttctggctataccttcaccaactatggtatgaactgggtccgtcaggccccgggtaagggcctggaatgggttggatggattaacacctataccggtgaaccgacctatgctgcggatttcaaacgtcgttttactttttctctggacacctccaagagcacagcttacctgcagatgaacagcctgcgcgctgaggacactgccgtctattactgtgcaaagtacccgcactattatgggagcagccactggtatttcgacgtctggggtcaaggaaccctggtcaccgtctcctcggcctccaccaagggcccatcggtcttccccctggcaccctcctccaagagcacctctgggggcacagcggccctgggctgcctggtcaaggactacttccccgaaccggtgacggtgtcgtggaactcaggcgccctgaccagcggcgtgcacaccttcccggctgtcctacagtcctcaggactctactccctcagcagcgtggtgaccgtgccctccagcagcttgggcacccagacctacatctgcaacgtgaatcacaagcccagcaacaccaaggtcgacaagaaagttgagcccaaatcttgtgacaaaactcacacatgcccaccgtgcccagcacctgagctcctggggggaccgtcagtcttcctcttccccccaaaacccaaggacaccctcatgatctcccggacccctgaggtcacatgcgtggtggtggacgtgagccacgaagaccctgaggtcaagttcaactggtacgtggacggcgtggaggtgcataatgccaagacaaagccgcgggaggagcagtacaacagcacgtaccgtgtggtcagcgtcctcaccgtcctgcaccaggactggctgaatggcaaggagtacaagtgcaaggtctccaacaaagccctcccagcccccatcgagaaaaccatctccaaagccaaagggcagccccgagaaccacaggtgtacaccctgcccccatcccgggaggagatgaccaagaaccaggtcagcctgacctgcctggtcaaaggcttctatcccagcgacatcgccgtggagtgggagagcaatgggcagccggagaacaactacaagaccacgcctcccgtgctggactccgacggctccttcttcctctacagcaagctcaccgtggacaagagcaggtggcagcaggggaacgtcttctcatgctccgtgatgcacgaggctctgcacaaccactacacgcagaagagcctctccctgtctccgggtaaaggaagcggagctactaacttcagcctgctgaagcaggctggagacgtggaggagaaccctggacctgactggacctggcgcgtgttttgcctgctcgccgtggctcctggggcccacagcgatatccagatgacccagtccccgagctccctgtccgcctctgtgggcgatagggtcaccatcacctgcagcgcaagtcaggatattagcaactatttaaactggtatcaacagaaaccaggaaaagctccgaaagtcctgatttacttcacctcctctctccactctggagtcccttctcgcttctctggatccggttctgggacggatttcactctgaccatcagcagtctgcagccagaagacttcgcaacttattactgtcaacagtatagcaccgtgccgtggacgtttggacagggtaccaaggtggagatcaaacgaactgtggctgcaccatctgtcttcatcttcccgccatctgatgagcagttgaaatctggaactgcttctgttgtgtgcctgctgaataacttctatcccagagaggccaaagtacagtggaaggtggataacgccctccaatcgggtaactcccaggagagtgtcacagagcaggacagcaaggacagcacctacagcctcagcagcaccctgacgctgagcaaagcagactacgagaaacacaaagtctacgcctgcgaagtcacccatcagggcctgagctcgcccgtcacaaagagcttcaacaggggagagtgttaagctagcttgactgactgagatacagcgtaccttcagctcacagacatgataagatacattgatgagtttggacaaaccacaactagaatgcagtgaaaaaaatgctttatttgtgaaatttgtgatgctattgctttatttgtaaccattataagctgcaataaacaagttaacaacaacaattgcattcattttatgtttcaggttcagggggaggtgtgggaggttttttaaagcaagtaaaacctctacaaatgtggtagtcgtcagctatcctgcaggaacttgtttatttgaaaatcaattcacaaaatccgagtagttattttgcctcccccttcccatttaacagaatacaccaatctctccccacgcacagctttaaacatttggataccattagatatagacatggttttagattccacattccaaacagtttcagagcgagccaatctggggtcagtgatagataaaaatccatcgggatagtcttttaaagcgctttcacagtccaactgctgcggatgcgactccggagtctggatcacggtcatctggaagaagaacgatgggaatcataatccgaaaacggtatcggacgattgtgtctcatcaaacccacaagcagccgctgtctgcgtcgctccgtgcgactgctgtttatgggatcagggtccacagtgtcctgaagcatgattttaatagcccttaacatcaactttctggtgcgatgcgcgcagcaacgcattctgatttcactcaaatctttgcagtaggtacaacacattattacaatattgtttaataaaccataattaaaagcgctccagccaaaactcatatctgatataatcgcccctgcatgaccatcataccaaagtttaatataaattaaatgacgttccctcaaaaacacactacccacatacatgatctcttttggcatgtgcatattaacaatctgtctgtaccatggacaacgttggttaatcatgcaacccaatataaccttccggaaccacactgccaacaccgctcccccagccatgcattgaagtgaaccctgctgattacaatgacaatgaagaacccaattctctcgaccgtgaatcacttgagaatgaaaaatatctatagtggcacaacatagacataaatgcatgcatcttctcataatttttaactcctcaggatttagaaacatatcccagggaataggaagctcttgcagaacagtaaagctggcagaacaaggaagaccacgaacacaacttacactatgcatagtcatagtatcacaatctggcaacagcgggtggtcttcagtcatagaagctcgggtttcattttcctcacaacgtggtaactgggctctggtgtaagggtgatgtctggcgcatgatgtcgagcgtgcgcgcaaccttgtcataatggagttgcttcctgacattctcgtattttgtatagcaaaacgcggccctggcagaacacactcttcttcgccttctatcctgccgcttagcgtgttccgtgtgatagttcaagtacaaccacactcttaagttggtcaaaagaatgctggcttcagttgtaatcaaaactccatcgcatctaatcgttctgaggaaatcatccaagcaatgcaactggattgtgtttcaagcaggagaggagagggaagagacggaagaaccatgttaatttttattccaaacgatctcgcagtacttcaaattgtagatcgcgcagatggcatctctcgcccccactgtgttggtgaaaaagcacagctagatcaaaagaaatgcgattttcaaggtgctcaacggtggcttccagcaaagcctccacgcgcacatccaagaacaaaagaataccaaaagaaggagcattttctaactcctcaatcatcatattacattcctgcaccattcccagataattttcagctttccagccttgaattattcgtgtcagttcttgtggtaaatccaatccacacattacaaacaggtcccggagggcgccctccaccaccattcttaaacacaccctcataatgacaaaatatcttgctcctgtgtcacctgtagcgaattgagaatggcaacatcaattgacatgcccttggctctaagttcttctttaagttctagttgtaaaaactctctcatattatcaccaaactgcttagccagaagccccccgggaacaagagcaggggacgctacagtgcagtacaagcgcagacctccccaattggctccagcaaaaacaagattggaataagcatattgggaaccgccagtaatatcatcgaagttgctggaaatataatcaggcagagtttcttgtaaaaattgaataaaagaaaaatttgccaaaaaaacattcaaaacctctgggatgcaaatgcaataggttaccgcgctgcgctccaacattgttagttttgaattagtctgcaaaaataaaaaaaaaaacaagcgtcatatcatagtagcctgacgaacagatggataaatcagtctttccatcacaagacaagccacagggtctccagctcgaccctcgtaaaacctgtcatcatgattaaacaacagcaccgaaagttcctcgcggtgaccagcatgaataattcttgatgaagcatacaatccagacatgttagcatcagttaacgagaaaaaacagccaacatagcctttgggtataattatgcttaatcgtaagtatagcaaagccacccctcgcggatacaaagtaaaaggcacaggagaataaaaaatataattatttctctgctgctgttcaggcaacgtcgcccccggtccctctaaatacacatacaaagcctcatcagccatggcttaccagacaaagtacagcgggcacacaaagcacaagctctaaagtgactctccaacctctccacaatatatatatacacaagccctaaactgacgtaatgggagtaaagtgtaaaaaatcccgccaaacccaacacacaccccgaaactgcgtcaccagggaaaagtacagtttcacttccgcaatcccaacaggcgtaacttcctctttctcacggtacgtgatatcccactaacttgcaacgtcattttcccacggtcgcaccgccccttttagccgttaaccccacagccaatcaccacacgatccacactttttaaaatcacctcatttacatattggcaccattccatctataaggtatattatatagataga

SEQ ID NO: 60 - DNA, 34792 bp, Artificial Sequence
  NG-190 virus genome sequence consisting of a transgene cassette encoding an anti-PD-L1 full length antibody inserted into the region BY.
tctatctatataatataccttatagatggaatggtgccaatatgtaaatgaggtgattttaaaaagtgtggatcgtgtggtgattggctgtggggttaacggctaaaaggggcggtgcgaccgtgggaaaatgacgttttgtgggggtggagtttttttgcaagttgtcgcgggaaatgtgacgcataaaaaggcttttttctcacggaactacttagttttcccacggtatttaacaggaaatgaggtagttttgaccggatgcaagtgaaaattgttgattttcgcgcgaaaactgaatgaggaagtgtttttctgaataatgtggtatttatggcagggtggagtatttgttcagggccaggtagactttgacccattacgtggaggtttcgattaccgtgttttttacctgaatttccgcgtaccgtgtcaaagtcttctgtttttacgtaggtgtcagctgatcgctagggtatttatacctcagggtttgtgtcaagaggccactcttgagtgccagcgagaagagttttctcctctgcgccggcagtttaataataaaaaaatgagagatttgcgatttctgcctcaggaaataatctctgctgagactggaaatgaaatattggagcttgtggtgcacgccctgatgggagacgatccggagccacctgtgcagctttttgagcctcctacgcttcaggaactgtatgatttagaggtagagggatcggaggattctaatgaggaagctgtaaatggcttttttaccgattctatgcttttagctgctaatgaagggttagaattagatccgcctttggacacttttgatactccaggggtaattgtggaaagcggtacaggtgtaagaaaattacctgatttgagttccgtggactgtgatttgcactgctatgaagacgggtttcctccgagtgatgaggaggaccatgaaaaggagcagtccatgcagactgcagcgggtgagggagtgaaggctgccaatgttggttttcagttggattgcccggagcttcctggacatggctgtaagtcttgtgaatttcacaggaaaaatactggagtaaaggaactgttatgttcgctttgttatatgagaacgcactgccactttatttacagtaagtgtgtttaagttaaaatttaaaggaatatgctgtttttcacatgtatattgagtgtgagttttgtgcttcttattataggtcctgtgtctgatgctgatgaatcaccatctcctgattctactacctcacctcctgagattcaagcacctgttcctgtggacgtgcgcaagcccattcctgtgaagcttaagcctgggaaacgtccagcagtggaaaaacttgaggacttgttacagggtggggacggacctttggacttgagtacacggaaacgtccaagacaataagtgttccatatccgtgtttacttaaggtgacgtcaatatttgtgtgacagtgcaatgtaataaaaatatgttaactgttcactggtttttattgctttttgggcggggactcaggtatataagtagaagcagacctgtgtggttagctcataggagctggctttcatccatggaggtttgggccattttggaagaccttaggaagactaggcaactgttagagaacgcttcggacggagtctccggtttttggagattctggttcgctagtgaattagctagggtagtttttaggataaaacaggactataaacaagaatttgaaaagttgttggtagattgcccaggactttttgaagctcttaatttgggccatcaggttcactttaaagaaaaagttttatcagttttagacttttcaaccccaggtagaactgctgctgctgtggcttttcttacttttatattagataaatggatcccgcagactcatttcagcaggggatacgttttggatttcatagccacagcattgtggagaacatggaaggttcgcaagatgaggacaatcttaggttactggccagtgcagcctttgggtgtagcgggaatcctgaggcatccaccggtcatgccagcggttctggaggaggaacagcaagaggacaacccgagagccggcctggaccctccagtggaggaggcggagtagctgacttgtctcctgaactgcaacgggtgcttactggatctacgtccactggacgggataggggcgttaagagggagagggcatctagtggtactgatgctagatctgagttggctttaagtttaatgagtcgcagacgtcctgaaaccatttggtggcatgaggttcagaaagagggaagggatgaagtttctgtattgcaggagaaatattcactggaacaggtgaaaacatgttggttggagcctgaggatgattgggaggtggccattaaaaattatgccaagatagctttgaggcctgataaacagtataagattactagacggattaatatccggaatgcttgttacatatctggaaatggggctgaggtggtaatagatactcaagacaaggcagttattagatgctgcatgatggatatgtggcctggggtagtcggtatggaagcagtaacttttgtaaatgttaagtttaggggagatggttataatggaatagtgtttatggccaataccaaacttatattgcatggttgtagcttttttggtttcaacaatacctgtgtagatgcctggggacaggttagtgtacggggatgtagtttctatgcgtgttggattgccacagctggcagaaccaagagtcaattgtctctgaagaaatgcatatttcaaagatgtaacctgggcattctgaatgaaggcgaagcaagggtccgccactgcgcttctacagatactggatgttttattttgattaagggaaatgccagcgtaaagcataacatgatttgcggtgcttccgatgagaggccttatcaaatgctcacttgtgctggtgggcattgtaatatgctggctactgtgcatattgtttcccatcaacgcaaaaaatggcctgtttttgatcacaatgtgatgacgaagtgtaccatgcatgcaggtgggcgtagaggaatgtttatgccttaccagtgtaacatgaatcatgtgaaagtgttgttggaaccagatgccttttccagaatgagcctaacaggaatttttgacatgaacatgcaaatctggaagatcctgaggtatgatgatacgagatcgagggtacgcgcatgcgaatgcggaggcaagcatgccaggttccagccggtgtgtgtagatgtgactgaagatctcagaccggatcatttggttattgcccgcactggagcagagttcggatccagtggagaagaaactgactaaggtgagtattgggaaaactttggggtgggattttcagatggacagattgagtaaaaatttgttttttctgtcttgcagctgtcatgagtggaaacgcttcttttaaggggggagtcttcagcccttatctgacagggcgtctcccatcctgggcaggagttcgtcagaatgttatgggatctactgtggatggaagacccgtccaacccgccaattcttcaacgctgacctatgctactttaagttcttcacctttggacgcagctgcagctgccgccgccgcttctgttgccgctaacactgtgcttggaatgggttactatggaagcatcatggctaattccacttcctctaataacccttctaccctgactcaggacaagttacttgtccttttggcccagctggaggctttgacccaacgtctgggtgaactttctcagcaggtggtcgagttgcgagtacaaactgagtctgctgtcggcacggcaaagtctaaataaaaaaatcccagaatcaatgaataaataaacaagcttgttgttgatttaaaatcaagtgtttttatttcatttttcgcgcacggtatgccctagaccaccgatctctatcattgagaactcggtggattttttccaggatcctatagaggtgggattgaatgtttagatacatgggcattaggccgtctttggggtggagatagctccattgaagggattcatgctccggggtagtgttgtaaatcacccagtcataacaaggtcgcagtgcatggtgttgcacaatatcttttagaagtaggctgattgccacagataagcccttggtgtaggtgtttacaaaccggttgagctgggatgggtgcattcggggtgaaattatgtgcattttggattggatttttaagttggcaatattgccgccaagatcccgtcttgggttcatgttatgaaggaccaccaagacggtgtatccggtacatttaggaaatttatcgtgcagcttggatggaaaagcgtggaaaaatttggagacacccttgtgtcctccaagattttccatgcactcatccatgataatagcaatggggccgtgggcagcggcgcgggcaaacacgttccgtgggtctgacacatcatagttatgttcctgagttaaatcatcataagccattttaatgaatttggggcggagagtaccagattggggtatgaatgttccttcgggccccggagcatagttcccctcacagatttgcatttcccaagctttcagttccgagggtggaatcatgtccacctggggggctatgaaaaacaccgtttctggggcgggggtgattaattgtgatgatagcaaatttctgagcaattgagatttgccacatccggtggggccataaatgattccgattacgggttgcaggtggtagtttagggaacggcaactgccgtcttctcgaagcaagggggccacctcgttcatcatttcccttacatgcatattttcccgcaccaaatccattaggaggcgctctcctcctagtgatagaagttcttgtagtgaggaaaagtttttcagcggtttcagaccgtcagccatgggcattttggagagagtttgctgcaaaagttctagtctgttccacagttcagtgatgtgttctatggcatctcgatccagcagacctcctcgtttcgcgggtttggacggctcctggaatagggtatgagacgatgggcgtccagcgctgccagggttcggtccttccagggtctcagtgttcgagtcagggttgtttccgtcacagtgaaggggtgtgcgcctgcttgggcgcttgccagggtgcgcttcagactcatcctgctggtcgaaaacttctgtcgcttggcgccctgtatgtcggccaagtagcagtttaccatgagttcgtagttgagcgcctcggctgcgtggcctttggcgcggagcttacctttggaagttttcttgcataccgggcagtataggcatttcagcgcatacaacttgggcgcaaggaaaacggattctggggagtatgcatctgcgccgcaggaggcgcaaacagtttcacattccaccagccaggttaaatccggttcattggggtcaaaaacaagttttccgccatattttttgatgcgtttcttacctttggtctccatgagttcgtgtcctcgttgagtgacaaacaggctgtccgtgtccccgtagactgattttacaggcctcttctccagtggagtgcctcggtcttcttcgtacaggaactctgaccactctgatacaaaggcgcgcgtccaggccagcacaaaggaggctatgtgggaggggtagcgatcgttgtcaaccagggggtccaccttttccaaagtatgcaaacacatgtcaccctcttcaacatccaggaatgtgattggcttgtaggtgtatttcacgtgacctggggtccccgctgggggggtataaaagggggcggttctttgctcttcctcactgtcttccggatcgctgtccaggaacgtcagctgttggggtaggtattccctctcgaaggcgggcatgacctctgcactcaggttgtcagtttctaagaacgaggaggatttgatattgacagtgccggttgagatgcctttcatgaggttttcgtccatctggtcagaaaacacaatttttttattgtcaagtttggtggcaaatgatccatacagggcgttggataaaagtttggcaatggatcgcatggtttggttcttttccttgtccgcgcgctctttggcggcgatgttgagttggacatactcgcgtgccaggcacttccattcggggaagatagttgttaattcatctggcacgattctcacttgccaccctcgattatgcaaggtaattaaatccacactggtggccacctcgcctcgaaggggttcattggtccaacagagcctacctcctttcctagaacagaaagggggaagtgggtctagcataagttcatcgggagggtctgcatccatggtaaagattcccggaagtaaatccttatcaaaatagctgatgggagtggggtcatctaaggccatttgccattctcgagctgccagtgcgcgctcatatgggttaaggggactgccccatggcatgggatgggtgagtgcagaggcatacatgccacagatgtcatagacgtagatgggatcctcaaagatgcctatgtaggttggatagcatcgcccccctctgatacttgctcgcacatagtcatatagttcatgtgatggcgctagcagccccggacccaagttggtgcgattgggtttttctgttctgtagacgatctggcgaaagatggcgtgagaattggaagagatggtgggtctttgaaaaatgttgaaatgggcatgaggtagacctacagagtctctgacaaagtgggcataagattcttgaagcttggttaccagttcggcggtgacaagtacgtctagggcgcagtagtcaagtgtttcttgaatgatgtcataacctggttggtttttcttttcccacagttcgcggttgagaaggtattcttcgcgatccttccagtactcttctagcggaaacccgtctttgtctgcacggtaagatcctagcatgtagaactgattaactgccttgtaagggcagcagcccttctctacgggtagagagtatgcttgagcagcttttcgtagcgaagcgtgagtaagggcaaaggtgtctctgaccatgactttgaggaattggtatttgaagtcgatgtcgtcacaggctccctgttcccagagttggaagtctacccgtttcttgtaggcggggttgggcaaagcgaaagtaacatcattgaagagaatcttgccggccctgggcatgaaattgcgagtgatgcgaaaaggctgtggtacttccgctcggttattgataacctgggcagctaggacgatctcgtcgaaaccgttgatgttgtgtcctacgatgtataattctatgaaacgcggcgtgcctctgacgtgaggtagcttactgagctcatcaaaggttaggtctgtggggtcagataaggcgtagtgttcgagagcccattcgtgcaggtgaggattcgctttaaggaaggaggaccagaggtccactgccagtgctgtttgtaactggtcccggtactgacgaaaatgccgtccgactgccattttttctggggtgacgcaatagaaggtttgggggtcctgccgccagcgatcccacttgagttttatggcgaggtcataggcgatgttgacgagccgctggtctccagagagtttcatgaccagcatgaaggggattagctgcttgccaaaggaccccatccaggtgtaggtttccacatcgtaggtgagaaagagcctttctgtgcgaggatgagagccaatcgggaagaactggatctcctgccaccagttggaggaatggctgttgatgtgatggaagtagaactccctgcgacgcgccgagcattcatgcttgtgcttgtacagacggccgcagtagtcgcagcgttgcacgggttgtatctcgtgaatgagttgtacctggcttcccttgacgagaaatttcagtgggaagccgaggcctggcgattgtatctcgtgctttactatgttgtctgcatcggcctgttcatcttctgtctcgatggtggtcatgctgacgagccctcgcgggaggcaagtccagacctcggcgcggcaggggcggagctcgaggacgagagcgcgcaggctggagctgtccagggtcctgagacgctgcggactcaggttagtaggcagtgtcaggagattaacttgcatgatcttttggagggcgtgcgggaggttcagatagtacttgatctcaacgggtccgttggtggagatgtcgatggcttgcagggttccgtgtcccttgggcgctaccaccgtgcccttgtttttcattttggacggcggtggctctgttgcttcttgcatgtttagaagcggtgtcgagggcgcgcaccgggcggcaggggcggctcgggacccggcggcatggctggcagtggtacgtcggcgccgcgcgcgggtaggttctggtactgcgccctgagaagactcgcatgcgcgacgacgcggcggttgacatcctggatctgacgcctctgggtgaaagctaccggccccgtgagcttgaacctgaaagagagttcaacagaatcaatctcggtatcgttgacggcggcttgcctaaggatttcttgcacgtcaccagagttgtcctggtaggcgatctccgccatgaactgctcgatctcttcctcttgaagatctccgcggcccgctctctcgacggtggccgcgaggtcgttggagatgcgcccaatgagttgagagaatgcattcatgcccgcctcgttccagacgcggctgtagaccacggcccccacgggatctctcgcgcgcatgaccacctgggcgaggttgagctccacgtggcgggtgaagaccgcatagttgcataggcgctggaaaaggtagttgagtgtggtggcgatgtgctcggtgacgaagaaatacatgatccatcgtctcagcggcatctcgctgacatcgcccagagcttccaagcgctccatggcctcgtagaagtccacggcaaaattaaaaaactgggagtttcgcgcggacacggtcaactcctcttccagaagacggataagttcggcgatggtggtgcgcacctcgcgctcgaaagcccctgggatttcttcctcaatctcttcttcttccactaacatctcttcctcttcaggtggggctgcaggaggagggggaacgcggcgacgccggcggcgcacgggcagacggtcgatgaatctttcaatgacctctccgcggcggcggcgcatggtttcagtgacggcgcggccgttctcgcgcggtcgcagagtaaaaacaccgccgcgcatctccttaaagtggtgactgggaggttctccgtttgggagggagagggcgctgattatacattttattaattggcccgtagggactgcacgcagagatctgatcgtgtcaagatccacgggatctgaaaacctttcgacgaaagcgtctaaccagtcacagtcacaaggtaggctgagtacggcttcttgtgggcgggggtggttatgtgttcggtctgggtcttctgtttcttcttcatctcgggaaggtgagacgatgctgctggtgatgaaattaaagtaggcagttctaagacggcggatggtggcgaggagcaccaggtctttgggtccggcttgctggatacgcaggcgattggccattccccaagcattatcctgacatctagcaagatctttgtagtagtcttgcatgagccgttctacgggcacttcttcctcacccgttctgccatgcatacgtgtgagtccaaatccgcgcattggttgtaccagtgccaagtcagctacgactctttcggcgaggatggcttgctgtacttgggtaagggtggcttgaaagtcatcaaaatccacaaagcggtggtaagctcctgtattaatggtgtaagcacagttggccatgactgaccagttaactgtctggtgaccagggcgcacgagctcggtgtatttaaggcgcgaataggcgcgggtgtcaaagatgtaatcgttgcaggtgcgcaccagatactggtaccctataagaaaatgcggcggtggttggcggtagagaggccatcgttctgtagctggagcgccaggggcgaggtcttccaacataaggcggtgatagccgtagatgtacctggacatccaggtgattcctgcggcggtagtagaagcccgaggaaactcgcgtacgcggttccaaatgttgcgtagcggcatgaagtagttcattgtaggcacggtttgaccagtgaggcgcgcgcagtcattgatgctctatagacacggagaaaatgaaagcgttcagcgactcgactccgtagcctggaggaacgtgaacgggttgggtcgcggtgtaccccggttcgagacttgtactcgagccggccggagccgcggctaacgtggtattggcactcccgtctcgacccagcctacaaaaatccaggatacggaatcgagtcgttttgctggtttccgaatggcagggaagtgagtcctattttttttttttgccgctcagatgcatcccgtgctgcgacagatgcgcccccaacaacagcccccctcgcagcagcagcagcagcaatcacaaaaggctgtccctgcaactactgcaactgccgccgtgagcggtgcgggacagcccgcctatgatctggacttggaagagggcgaaggactggcacgtctaggtgcgccttcacccgagcggcatccgcgagttcaactgaaaaaagattctcgcgaggcgtatgtgccccaacagaacctatttagagacagaagcggcgaggagccggaggagatgcgagcttcccgctttaacgcgggtcgtgagctgcgtcacggtttggaccgaagacgagtgttgcgggacgaggatttcgaagttgatgaaatgacagggatcagtcctgccagggcacacgtggctgcagccaaccttgtatcggcttacgagcagacagtaaaggaagagcgtaacttccaaaagtcttttaataatcatgtgcgaaccctgattgcccgcgaagaagttacccttggtttgatgcatttgtgggatttgatggaagctatcattcagaaccctactagcaaacctctgaccgcccagctgtttctggtggtgcaacacagcagagacaatgaggctttcagagaggcgctgctgaacatcaccgaacccgaggggagatggttgtatgatcttatcaacattctacagagtatcatagtgcaggagcggagcctgggcctggccgagaaggtggctgccatcaattactcggttttgagcttgggaaaatattacgctcgcaaaatctacaagactccatacgttcccatagacaaggaggtgaagatagatgggttctacatgcgcatgacgctcaaggtcttgaccctgagcgatgatcttggggtgtatcgcaatgacagaatgcatcgcgcggttagcgccagcaggaggcgcgagttaagcgacagggaactgatgcacagtttgcaaagagctctgactggagctggaaccgagggtgagaattacttcgacatgggagctgacttgcagtggcagcctagtcgcagggctctgagcgccgcgacggcaggatgtgagcttccttacatagaagaggcggatgaaggcgaggaggaagagggcgagtacttggaagactgatggcacaacccgtgttttttgctagatggaacagcaagcaccggatcccgcaatgcgggcggcgctgcagagccagccgtccggcattaactcctcggacgattggacccaggccatgcaacgtatcatggcgttgacgactcgcaaccccgaagcctttagacagcaaccccaggccaaccgtctatcggccatcatggaagctgtagtgccttcccgctctaatcccactcatgagaaggtcctggccatcgtgaacgcgttggtggagaacaaagctattcgtccagatgaggccggactggtatacaacgctctcttagaacgcgtggctcgctacaacagtagcaatgtgcaaaccaatttggaccgtatgataacagatgtacgcgaagccgtgtctcagcgcgaaaggttccagcgtgatgccaacctgggttcgctggtggcgttaaatgctttcttgagtactcagcctgctaatgtgccgcgtggtcaacaggattatactaactttttaagtgctttgagactgatggtatcagaagtacctcagagcgaagtgtatcagtccggtcctgattacttctttcagactagcagacagggcttgcagacggtaaatctgagccaagcttttaaaaaccttaaaggtttgtggggagtgcatgccccggtaggagaaagagcaaccgtgtctagcttgttaactccgaactcccgcctattattactgttggtagctcctttcaccgacagcggtagcatcgaccgtaattcctatttgggttacctactaaacctgtatcgcgaagccatagggcaaagtcaggtggacgagcagacctatcaagaaattacccaagtcagtcgcgctttgggacaggaagacactggcagtttggaagccactctgaacttcttgcttaccaatcggtctcaaaagatccctcctcaatatgctcttactgcggaggaggagaggatccttagatatgtgcagcagagcgtgggattgtttctgatgcaagagggggcaactccgactgcagcactggacatgacagcgcgaaatatggagcccagcatgtatgccagtaaccgacctttcattaacaaactgctggactacttgcacagagctgccgctatgaactctgattatttcaccaatgccatcttaaacccgcactggctgcccccacctggtttctacacgggcgaatatgacatgcccgaccctaatgacggatttctgtgggacgacgtggacagcgatgttttttcacctctttctgatcatcgcacgtggaaaaaggaaggcggcgatagaatgcattcttctgcatcgctgtccggggtcatgggtgctaccgcggctgagcccgagtctgcaagtccttttcctagtctacccttttctctacacagtgtacgtagcagcgaagtgggtagaataagtcgcccgagtttaatgggcgaagaggagtatctaaacgattccttgctcagaccggcaagagaaaaaaatttcccaaacaatggaatagaaagtttggtggataaaatgagtagatggaagacttatgctcaggatcacagagacgagcctgggatcatggggattacaagtagagcgagccgtagacgccagcgccatgacagacagaggggtcttgtgtgggacgatgaggattcggccgatgatagcagcgtgctggacttgggtgggagaggaaggggcaacccgtttgctcatttgcgccctcgcttgggtggtatgttgtaaaaaaaaataaaaaaaaaactcaccaaggccatggcgacgagcgtacgttcgttcttctttattatctgtgtctagtataatgaggcgagtcgtgctaggcggagcggtggtgtatccggagggtcctcctccttcgtacgagagcgtgatgcagcagcagcaggcgacggcggtgatgcaatccccactggaggctccctttgtgcctccgcgatacctggcacctacggagggcagaaacagcattcgttattcggaactggcacctcagtacgataccaccaggttgtatctggtggacaacaagtcggcggacattgcttctctgaactatcagaatgaccacagcaacttcttgaccacggtggtgcaaaacaatgactttacccctacggaagccagcacccagaccattaactttgatgaacgatcgcggtggggcggtcagctaaagaccatcatgcatactaacatgccaaacgtgaacgagtatatgtttagtaacaagttcaaagcgcgtgtgatggtgtccagaaaacctcccgacggtgctgcagttggggatacttatgatcacaagcaggatattttgaaatatgagtggttcgagtttactttgccagaaggcaacttttcagttactatgactattgatttgatgaacaatgccatcatagataattacttgaaagtgggtagacagaatggagtgcttgaaagtgacattggtgttaagttcgacaccaggaacttcaagctgggatgggatcccgaaaccaagttgatcatgcctggagtgtatacgtatgaagccttccatcctgacattgtcttactgcctggctgcggagtggattttaccgagagtcgtttgagcaaccttcttggtatcagaaaaaaacagccatttcaagagggttttaagattttgtatgaagatttagaaggtggtaatattccggccctcttggatgtagatgcctatgagaacagtaagaaagaacaaaaagccaaaatagaagctgctacagctgctgcagaagctaaggcaaacatagttgccagcgactctacaagggttgctaacgctggagaggtcagaggagacaattttgcgccaacacctgttccgactgcagaatcattattggccgatgtgtctgaaggaacggacgtgaaactcactattcaacctgtagaaaaagatagtaagaatagaagctataatgtgttggaagacaaaatcaacacagcctatcgcagttggtatctttcgtacaattatggcgatcccgaaaaaggagtgcgttcctggacattgctcaccacctcagatgtcacctgcggagcagagcaggtctactggtcgcttccagacatgatgaaggatcctgtcactttccgctccactagacaagtcagtaactaccctgtggtgggtgcagagcttatgcccgtcttctcaaagagcttctacaacgaacaagctgtgtactcccagcagctccgccagtccacctcgcttacgcacgtcttcaaccgctttcctgagaaccagattttaatccgtccgccggcgcccaccattaccaccgtcagtgaaaacgttcctgctctcacagatcacgggaccctgccgttgcgcagcagtatccggggagtccaacgtgtgaccgttactgacgccagacgccgcacctgtccctacgtgtacaaggcactgggcatagtcgcaccgcgcgtcctttcaagccgcactttctaaaaaaaaaaaaaatgtccattcttatctcgcccagtaataacaccggttggggtctgcgcgctccaagcaagatgtacggaggcgcacgcaaacgttctacccaacatcctgtccgtgttcgcggacattttcgcgctccatggggcgccctcaagggccgcactcgcgttcgaaccaccgtcgatgatgtaatcgatcaggtggttgccgacgcccgtaattatactcctactgcgcctacatctactgtggatgcagttattgacagtgtagtggctgacgctcgcaactatgctcgacgtaagagccggcgaaggcgcattgccagacgccaccgagctaccactgccatgcgagccgcaagagctctgctacgaagagctagacgcgtggggcgaagagccatgcttagggcggccagacgtgcagcttcgggcgccagcgccggcaggtcccgcaggcaagcagccgctgtcgcagcggcgactattgccgacatggcccaatcgcgaagaggcaatgtatactgggtgcgtgacgctgccaccggtcaacgtgtacccgtgcgcacccgtccccctcgcacttagaagatactgagcagtctccgatgttgtgtcccagcggcgaggatgtccaagcgcaaatacaaggaagaaatgctgcaggttatcgcacctgaagtctacggccaaccgttgaaggatgaaaaaaaaccccgcaaaatcaagcgggttaaaaaggacaaaaaagaagaggaagatggcgatgatgggctggcggagtttgtgcgcgagtttgccccacggcgacgcgtgcaatggcgtgggcgcaaagttcgacatgtgttgagacctggaacttcggtggtctttacacccggcgagcgttcaagcgctacttttaagcgttcctatgatgaggtgtacggggatgatgatattcttgagcaggcggctgaccgattaggcgagtttgcttatggcaagcgtagtagaataacttccaaggatgagacagtgtcgatacccttggatcatggaaatcccacccctagtcttaaaccggtcactttgcagcaagtgttacccgtaactccgcgaacaggtgttaaacgcgaaggtgaagatttgtatcccactatgcaactgatggtacccaaacgccagaagttggaggacgttttggagaaagtaaaagtggatccagatattcaacctgaggttaaagtgagacccattaagcaggtagcgcctggtctgggggtacaaactgtagacattaagattcccactgaaagtatggaagtgcaaactgaacccgcaaagcctactgccacctccactgaagtgcaaacggatccatggatgcccatgcctattacaactgacgccgccggtcccactcgaagatcccgacgaaagtacggtccagcaagtctgttgatgcccaattatgttgtacacccatctattattcctactcctggttaccgaggcactcgctactatcgcagccgaaacagtacctcccgccgtcgccgcaagacacctgcaaatcgcagtcgtcgccgtagacgcacaagcaaaccgactcccggcgccctggtgcggcaagtgtaccgcaatggtagtgcggaacctttgacactgccgcgtgcgcgttaccatccgagtatcatcacttaatcaatgttgccgctgcctccttgcagatatggccctcacttgtcgccttcgcgttcccatcactggttaccgaggaagaaactcgcgccgtagaagagggatgttgggacgcggaatgcgacgctacaggcgacggcgtgctatccgcaagcaattgcggggtggttttttaccagccttaattccaattatcgctgctgcaattggcgcgataccaggcatagcttccgtggcggttcaggcctcgcaacgacattgacattggaaaaaaacgtataaataaaaaaaaaaaaatacaatggactctgacactcctggtcctgtgactatgttttcttagagatggaagacatcaatttttcatccttggctccgcgacacggcacgaagccgtacatgggcacctggagcgacatcggcacgagccaactgaacgggggcgccttcaattggagcagtatctggagcgggcttaaaaattttggctcaaccataaaaacatacgggaacaaagcttggaacagcagtacaggacaggcgcttagaaataaacttaaagaccagaacttccaacaaaaagtagtcgatgggatagcttccggcatcaatggagtggtagatttggctaaccaggctgtgcagaaaaagataaacagtcgtttggacccgccgccagcaaccccaggtgaaatgcaagtggaggaagaaattcctccgccagaaaaacgaggcgacaagcgtccgcgtcccgatttggaagagacgctggtgacgcgcgtagatgaaccgccttcttatgaggaagcaacgaagcttggaatgcccaccactagaccgatagccccaatggccaccggggtgatgaaaccttctcagttgcatcgacccgtcaccttggatttgccccctccccctgctgctactgctgtacccgcttctaagcctgtcgctgccccgaaaccagtcgccgtagccaggtcacgtcccgggggcgctcctcgtccaaatgcgcactggcaaaatactctgaacagcatcgtgggtctaggcgtgcaaagtgtaaaacgccgtcgctgcttttaattaaatatggagtagcgcttaacttgcctatctgtgtatatgtgtcattacacgccgtcacagcagcagaggaaaaaaggaagaggtcgtgcgtcgacgctgagttactttcaagatggccaccccatcgatgctgccccaatgggcatacatgcacatcgccggacaggatgcttcggagtacctgagtccgggtctggtgcagttcgcccgcgccacagacacctacttcaatctgggaaataagtttagaaatcccaccgtagcgccgacccacgatgtgaccaccgaccgtagccagcggctcatgttgcgcttcgtgcccgttgaccgggaggacaatacatactcttacaaagtgcggtacaccctggccgtgggcgacaacagagtgctggatatggccagcacgttctttgacattaggggtgtgttggacagaggtcccagtttcaaaccctattctggtacggcttacaactccctggctcctaaaggcgctccaaatacatctcagtggattgcagaaggtgtaaaaaatacaactggtgaggaacacgtaacagaagaggaaaccaatactactacttacacttttggcaatgctcctgtaaaagctgaagctgaaattacaaaagaaggactcccagtaggtttggaagtttcagatgaagaaagtaaaccgatttatgctgataaaacatatcagccagaacctcagctgggagatgaaacttggactgaccttgatggaaaaaccgaaaagtatggaggcagggctctcaaacccgatactaagatgaaaccatgctacgggtcctttgccaaacctactaatgtgaaaggcggtcaggcaaaacaaaaaacaacggagcagccaaatcagaaagtcgaatatgatatcgacatggagttttttgatgcggcatcgcagaaaacaaacttaagtcctaaaattgtcatgtatgcagaaaatgtaaatttggaaactccagacactcatgtagtgtacaaacctggaacagaagacacaagttccgaagctaatttgggacaacaatctatgcccaacagacccaactacattggcttcagagataactttattggacttatgtactataacagtactggtaacatgggggtgctggctggtcaagcgtctcagttaaatgcagtggttgacttgcaggacagaaacacagaactttcttaccaactcttgcttgactctctgggcgacagaaccagatactttagcatgtggaatcaggctgtggacagttatgatcctgatgtacgtgttattgaaaatcatggtgtggaagatgaacttcccaactactgttttccactggacggcataggtgttccaacaaccagttacaaatcaatagttccaaatggagacaatgcgcctaattggaaggaacctgaagtaaatggaacaagtgagatcggacagggtaatttgtttgccatggaaattaaccttcaagccaatctatggcgaagtttcctttattccaatgtggctctatatctcccagactcgtacaaatacaccccgtccaatgtcactcttccagaaaacaaaaacacctacgactacatgaacgggcgggtggtgccgccatctctagtagacacctatgtgaacattggtgccaggtggtctctggatgccatggacaatgtcaacccattcaaccaccaccgtaacgctggcttgcgttaccgatccatgcttctgggtaacggacgttatgtgcctttccacatacaagtgcctcaaaaattcttcgctgttaaaaacctgctgcttctcccaggctcctacacttatgagtggaactttaggaaggatgtgaacatggttctacagagttccctcggtaacgacctgcgggtagatggcgccagcatcagtttcacgagcatcaacctctatgctacttttttccccatggctcacaacaccgcttccacccttgaagccatgctgcggaatgacaccaatgatcagtcattcaacgactacctatctgcagctaacatgctctaccccattcctgccaatgcaaccaatattcccatttccattccttctcgcaactgggcggctttcagaggctggtcatttaccagactgaaaaccaaagaaactccctctttggggtctggatttgacccctactttgtctattctggttctattccctacctggatggtaccttctacctgaaccacacttttaagaaggtttccatcatgtttgactcttcagtgagctggcctggaaatgacaggttactatctcctaacgaatttgaaataaagcgcactgtggatggcgaaggctacaacgtagcccaatgcaacatgaccaaagactggttcttggtacagatgctcgccaactacaacatcggctatcagggcttctacattccagaaggatacaaagatcgcatgtattcatttttcagaaacttccagcccatgagcaggcaggtggttgatgaggtcaattacaaagacttcaaggccgtcgccataccctaccaacacaacaactctggctttgtgggttacatggctccgaccatgcgccaaggtcaaccctatcccgctaactatccctatccactcattggaacaactgccgtaaatagtgttacgcagaaaaagttcttgtgtgacagaaccatgtggcgcataccgttctcgagcaacttcatgtctatgggggcccttacagacttgggacagaatatgctctatgccaactcagctcatgctctggacatgacctttgaggtggatcccatggatgagcccaccctgctttatcttctcttcgaagttttcgacgtggtcagagtgcatcagccacaccgcggcatcatcgaggcagtctacctgcgtacaccgttctcggccggtaacgctaccacgtaagaagcttcttgcttcttgcaaatagcagctgcaaccatggcctgcggatcccaaaacggctccagcgagcaagagctcagagccattgtccaagacctgggttgcggaccctattttttgggaacctacgataagcgcttcccggggttcatggcccccgataagctcgcctgtgccattgtaaatacggccggacgtgagacggggggagagcactggttggctttcggttggaacccacgttctaacacctgctacctttttgatccttttggattctcggatgatcgtctcaaacagatttaccagtttgaatatgagggtctcctgcgccgcagcgctcttgctaccaaggaccgctgtattacgctggaaaaatctacccagaccgtgcagggtccccgttctgccgcctgcggacttttctgctgcatgttccttcacgcctttgtgcactggcctgaccgtcccatggacggaaaccccaccatgaaattgctaactggagtgccaaacaacatgcttcattctcctaaagtccagcccaccctgtgtgacaatcaaaaagcactctaccattttcttaatacccattcgccttattttcgctcccatcgtacacacatcgaaagggccactgcgttcgaccgtatggatgttcaataatgactcatgtaaacaacgtgttcaataaacatcactttatttttttacatgtatcaaggctctgcattacttatttatttacaagtcgaatgggttctgacgagaatcagaatgacccgcaggcagtgatacgttgcggaactgatacttgggttgccacttgaattcgggaatcaccaacttgggaaccggtatatcgggcaggatgtcactccacagctttctggtcagctgcaaagctccaagcaggtcaggagccgaaatcttgaaatcacaattaggaccagtgctttgagcgcgagagttgcggtacaccggattgcagcactgaaacaccatcagcgacggatgtctcacgcttgccagcacggtgggatctgcaatcatgcccacatccagatcttcagcattggcaatgctgaacggggtcatcttgcaggtctgcctacccatggcgggcacccaattaggcttgtggttgcaatcgcagtgcagggggatcagtatcatcttggcctgatcctgtctgattcctggatacacggctctcatgaaagcatcatattgcttgaaagcctgctgggctttactaccctcggtataaaacatcccgcaggacctgctcgaaaactggttagctgcacagccggcatcattcacacagcagcgggcgtcattgttagctatttgcaccacacttctgccccagcggttttgggtgattttggttcgctcgggattctcctttaaggctcgttgtccgttctcgctggccacatccatctcgataatctgctccttctgaatcataatattgccatgcaggcacttcagcttgccctcataatcattgcagccatgaggccacaacgcacagcctgtacattcccaattatggtgggcgatctgagaaaaagaatgtatcattccctgcagaaatcttcccatcatcgtgctcagtgtcttgtgactagtgaaagttaactggatgcctcggtgctcctcgtttacgtactggtgacagatgcgcttgtattgttcgtgttgctcaggcattagtttaaaagaggttctaagttcgttatccagcctgtacttctccatcagcagacacatcacttccatgcctttctcccaagcagacaccaggggcaagctaatcggattcttaacagtgcaggcagcagctcctttagccagagggtcatctttagcgatcttctcaatgcttcttttgccatccttctcaacgatgcgcacgggcgggtagctgaaacccactgctacaagttgcgcctcttctctttcttcttcgctgtcttgactgatgtcttgcatggggatatgtttggtcttccttggcttctttttggggggtatcggaggaggaggactgtcgctccgttccggagacagggaggattgtgacgtttcgctcaccattaccaactgactgtcggtagaagaacctgaccccacacggcgacaggtgtttctcttcgggggcagaggtggaggcgattgcgaagggctgcggtccgacctggaaggcggatgactggcagaaccccttccgcgttcgggggtgtgctccctgtggcggtcgcttaactgatttccttcgcggctggccattgtgttctcctaggcagagaaacaacagacatggaaactcagccattgctgtcaacatcgccacgagtgccatcacatctcgtcctcagcgacgaggaaaaggagcagagcttaagcattccaccgcccagtcctgccaccacctctaccctagaagataaggaggtcgacgcatctcatgacatgcagaataaaaaagcgaaagagtctgagacagacatcgagcaagacccgggctatgtgacaccggtggaacacgaggaagagttgaaacgctttctagagagagaggatgaaaactgcccaaaacaacgagcagataactatcaccaagatgctggaaatagggatcagaacaccgactacctcatagggcttgacggggaagacgcgctccttaaacatctagcaagacagtcgctcatagtcaaggatgcattattggacagaactgaagtgcccatcagtgtggaagagctcagccgcgcctacgagcttaacctcttttcacctcgtactccccccaaacgtcagccaaacggcacctgcgagccaaatcctcgcttaaacttttatccagcttttgctgtgccagaagtactggctacctatcacatcttttttaaaaatcaaaaaattccagtctcctgccgcgctaatcgcacccgcgccgatgccctactcaatctgggacctggttcacgcttacctgatatagcttccttggaagaggttccaaagatcttcgagggtctgggcaataatgagactcgggccgcaaatgctctgcaaaagggagaaaatggcatggatgagcatcacagcgttctggtggaattggaaggcgataatgccagactcgcagtactcaagcgaagcatcgaggtcacacacttcgcatatcccgctgtcaacctgccccctaaagtcatgacggcggtcatggaccagttactcattaagcgcgcaagtcccctttcagaagacatgcatgacccagatgcctgtgatgagggtaaaccagtggtcagtgatgagcagctaacccgatggctgggcaccgactctcccagggatttggaagagcgtcgcaagcttatgatggccgtggtgctggttaccgtagaactagagtgtctccgacgtttctttaccgattcagaaaccttgcgcaaactcgaagagaatctgcactacacttttagacacggctttgtgcggcaggcatgcaagatatctaacgtggaactcaccaacctggtttcctacatgggtattctgcatgagaatcgcctaggacaaagcgtgctgcacagcaccctgaagggggaagcccgccgtgattacatccgcgattgtgtctatctgtacctgtgccacacgtggcaaaccggcatgggtgtatggcagcaatgtttagaagaacagaacttgaaagagcttgacaagctcttacagaaatctcttaaggttctgtggacagggttcgacgagcgcaccgtcgcttccgacctggcagacctcatcttcccagagcgtctcagggttactttgcgaaacggattgcctgactttatgagccagagcatgcttaacaattttcgctctttcatcctggaacgctccggtatcctgcccgccacctgctgcgcactgccctccgactttgtgcctctcacctaccgcgagtgccccccgccgctatggagtcactgctacctgttccgtctggccaactatctctcctaccactcggatgtgatcgaggatgtgagcggagacggcttgctggagtgtcactgccgctgcaatctgtgcacgccccaccggtccctagcttgcaacccccagttgatgagcgaaacccagataataggcacctttgaattgcaaggccccagcagccaaggcgatgggtcttctcctgggcaaagtttaaaactgaccccgggactgtggacctccgcctacttgcgcaagtttgctccggaagattaccacccctatgaaatcaagttctatgaggaccaatcacagcctccaaaggccgaactttcggcctgcgtcatcacccagggggcaattctggcccaattgcaagccatccaaaaatcccgccaagaatttctactgaaaaagggtaagggggtctaccttgacccccagaccggcgaggaactcaacacaaggttccctcaggatgtcccaacgacgagaaaacaagaagttgaaggtgcagccgccgcccccagaagatatggaggaagattgggacagtcaggcagaggaggcggaggaggacagtctggaggacagtctggaggaagacagtttggaggaggaaaacgaggaggcagaggaggtggaagaagtaaccgccgacaaacagttatcctcggctgcggagacaagcaacagcgctaccatctccgctccgagtcgaggaacccggcggcgtcccagcagtagatgggacgagaccggacgcttcccgaacccaaccagcgcttccaagaccggtaagaaggatcggcagggatacaagtcctggcgggggcataagaatgccatcatctcctgcttgcatgagtgcgggggcaacatatccttcacgcggcgctacttgctattccaccatggggtgaactttccgcgcaatgttttgcattactaccgtcacctccacagcccctactatagccagcaaatcccggcagtctcgacagataaagacagcggcggcgacctccaacagaaaaccagcagcggcagttagaaaatacacaacaagtgcagcaacaggaggattaaagattacagccaacgagccagcgcaaacccgagagttaagaaatcggatctttccaaccctgtatgccatcttccagcagagtcggggtcaagagcaggaactgaaaataaaaaaccgatctctgcgttcgctcaccagaagttgtttgtatcacaagagcgaagatcaacttcagcgcactctcgaggacgccgaggctctcttcaacaagtactgcgcgctgactcttaaagagtaggcagcgaccgcgcttattcaaaaaaggcgggaattacatcatcctcgacatgagtaaagaaattcccacgccttacatgtggagttatcaaccccaaatgggattggcggcaggcgcctcccaggactactccacccgcatgaattggctcagcgccgggccttctatgatttctcgagttaatgatatacgcgcctaccgaaaccaaatacttttggaacagtcagctcttaccaccacgccccgccaacaccttaatcccagaaattggcccgccgccctagtgtaccaggaaagtcccgctcccaccactgtattacttcctcgagacgcccaggccgaagtccaaatgactaatgcaggtgcgcagttagctggcggctccaccctatgtcgtcacaggcctcggcataatataaaacgcctgatgatcagaggccgaggtatccagctcaacgacgagtcggtgagctctccgcttggtctacgaccagacggaatctttcagattgccggctgcgggagatcttccttcacccctcgtcaggctgttctgactttggaaagttcgtcttcgcaaccccgctcgggcggaatcgggaccgttcaatttgtggaggagtttactccctctgtctacttcaaccccttctccggatctcctgggcattacccggacgagttcataccgaacttcgacgcgattagcgagtcagtggacggctacgattgatgtctggtgacgcggctgagctatctcggctgcgacatctagaccactgccgccgctttcgctgctttgcccgggaactcattgagttcatctacttcgaactccccaaggatcaccctcaaggtccggcccacggagtgcggatttctatcgaaggcaaaatagactctcgcctgcaacgaattttctcccagcggcccgtgctgatcgagcgagaccagggaaacaccacggtttccatctactgcatttgtaatcaccccggattgcatgaaagcctttgctgtcttatgtgtactgagtttaataaaaactgaattaagactctcctacggactgccgcttcttcaacccggattttacaaccagaagaacgaaacttttcctgtcgtccaggactctgttaacttcacctttcctactcacaaactagaagctcaacgactacaccgcttttccagaagcattttccctactaatactactttcaaaaccggaggtgagctccaaggtcttcctacagaaaacccttgggtggaagcgggccttgtagtgctaggaattcttgcgggtgggcttgtgattattctttgctacctatacacaccttgcttcactttcttagtggtgttgtggtattggtttaaaaaatggggcccatactagtcttgcttgttttactttcgcttttggaaccgggttctgccaattacgatccatgtctagacttcgacccagaaaactgcacacttacttttgcacccgacacaagccgcatctgtggagttcatcgcctctcttacgaacttggcccccaacgacaaaaatttacctgcatggtgggaatcaaccccatagttatcacccagcaaagtggagatactaagggttgcattcactgctcctgcgattccatcgagtgcacctacaccctgctgaagaccctatgcggcctaagagacctgctaccaatgaattaaaaaatgattaataaaaaatcacttacttgaaatcagcaataaggtctctgttgaaattttctcccagcagcacctcacttccctcttcccaactctggtattctaaaccccgttcagcggcatactttctccatactttaaaggggatgtcaaattttagctcctctcctgtacccacaatcttcatgtctttcttcccagatgaccaagagagtccggctcagtgactccttcaaccctgtctacccctatgaagatgaaagcacctcccaacacccctttataaacccagggtttatttccccaaatggcttcacacaaagcccaaacggagttcttactttaaaatgtttaaccccactaacaaccacaggcggatctctacagctaaaagtgggagggggacttacagtggatgacaccaacggttttttgaaagaaaacataagtgccaccacaccactcgttaagactggtcactctataggtttaccactaggagccggattgggaacgaatgaaaataaactttgtatcaaattaggacaaggacttacattcaattcaaacaacatttgcattgatgacaatattaacaccttatggacaggagtcaaccccaccgaagccaactgtcaaatcatgaactccagtgaatctaatgattgcaaattaattctaacactagttaaaactggagcactagtcactgcatttgtttatgttataggagtatctaacaattttaatatgctaactacacacagaaatataaattttactgcagagctgtttttcgattctactggtaatttactaactagactctcatccctcaaaactccacttaatcataaatcaggacaaaacatggctactggtgccattactaatgctaaaggtttcatgcccagcacgactgcctatcctttcaatgataattctagagaaaaagaaaactacatttacggaacttgttactacacagctagtgatcgcactgcttttcccattgacatatctgtcatgcttaaccgaagagcaataaatgacgagacatcatattgtattcgtataacttggtcctggaacacaggagatgccccagaggtgcaaacctctgctacaaccctagtcacctccccatttaccttttactacatcagagaagacgactgacaaataaagtttgcgatcgccaggcccaccatgggatggagctgcattatcctgtttctggttgctactgccactggagtgcatagcgaggtacagcttgtcgagtctggaggtgggctggtacaaccaggcggatccctcagactgtcttgtgccgcatctggcttcacgttcagcgatagttggatacactgggtgaggcaggcaccagggaaaggtctggagtgggtggcttggataagcccatatggtggctccacatattacgccgactcagtgaagggtcgcttcaccatttctgctgatacgtcaaagaacacagcctatctccagatgaactcccttcgtgccgaggataccgctgtctactattgtgcccggagacattggcctggcgggttcgactactggggacaggggactctcgtcactgtttctgcagcgtctactaaagggcccagcgtgtttcctcttgctccctccagtaagtcaactagtggcggcaccgctgctttgggctgcctggtcaaggactattttccagagcctgtaaccgtgagctggaatagtggagcattgacctcaggagtgcacacatttcccgcagtgctgcagtcaagcggactgtacagcctttccagtgtggtgaccgttccttcctcaagtctgggcactcaaacctacatctgcaacgtgaaccacaaacccagcaataccaaagtcgacaagaaggttgagccgaagagctgtgacaaaacgcacacatgccctccatgtcccgccccagaactgctcggtggaccgtccgtgttcctgtttcctccgaagcccaaggacacactgatgatcagtcgcaccccagaagtcacctgtgtggtggtggcggtaagccacgaagatcccgaggtcaagttcaattggtatgtcgatggggttgaggtccacaatgccaagactaagccaagggaggaacagtatgccagcacataccgagtcgtgtctgtgctgaccgttctgcatcaggactggctcaacgggaaagagtacaagtgcaaagtgtccaacaaggcacttcctgcccctatcgagaaaaccatcagcaaggcgaaaggtcagcccagagaaccacaagtctacacactgccaccctctcgggacgaactcacaaagaatcaggtgtcactgacatgcttggttaaaggcttttaccccagcgatattgccgtggaatgggaatccaatgggcaacctgagaacaactacaagactacacctcccgtattggatagcgatggaagcttcttcctgtactctaagttgacggttgacaaatccaggtggcagcagggcaatgtgttttcttgctccgtaatgcatgaagctctgcataatcactatacccagaaatccctctcactgagtccgggcaaaggaagcggagctactaacttcagcctgctgaagcaggctggagacgtggaggagaaccctggacctgactggacctggcgcgtgttttgcctgctcgccgtggctcctggggcccacagcgatatccaaatgactcagtctccctcttcactgtctgcaagcgttggcgatagggtgacaattacctgtagagcgagtcaggacgtttcaaccgctgtagcctggtaccagcagaaaccgggaaaagcccctaagctgctcatttactccgcttcctttctctattccggagtgcctagccgatttagtggctctggttcagggactgacttcacactgaccatatccagtctgcaaccagaggatttcgcgacgtactactgtcagcagtatctgtatcaccccgctacatttgggcaagggacaaaagtggagatcaaacggactgtagccgcacccagcgtgttcatctttccaccctctgatgagcagcttaagagcggtacggcatctgtcgtgtgcttgctgaacaacttctatcctcgtgaagccaaagtccagtggaaggtggacaatgccttgcagtcaggcaactcacaggaaagcgtcactgaacaggacagcaaggatagtacctacagcctgtccagcacactgactctctccaaagccgactatgagaagcacaaggtttacgcttgcgaagtgacccatcaaggccttagcagtccagtcaccaagtccttcaatcgcggagagtgctgagctagcttgactgactgagatacagcgtaccttcagctcacagacatgataagatacattgatgagtttggacaaaccacaactagaatgcagtgaaaaaaatgctttatttgtgaaatttgtgatgctattgctttatttgtaaccattataagctgcaataaacaagttaacaacaacaattgcattcattttatgtttcaggttcagggggaggtgtgggaggttttttaaagcaagtaaaacctctacaaatgtggtagtcgtcagctatcctgcaggaacttgtttatttgaaaatcaattcacaaaatccgagtagttattttgcctcccccttcccatttaacagaatacaccaatctctccccacgcacagctttaaacatttggataccattagatatagacatggttttagattccacattccaaacagtttcagagcgagccaatctggggtcagtgatagataaaaatccatcgggatagtcttttaaagcgctttcacagtccaactgctgcggatgcgactccggagtctggatcacggtcatctggaagaagaacgatgggaatcataatccgaaaacggtatcggacgattgtgtctcatcaaacccacaagcagccgctgtctgcgtcgctccgtgcgactgctgtttatgggatcagggtccacagtgtcctgaagcatgattttaatagcccttaacatcaactttctggtgcgatgcgcgcagcaacgcattctgatttcactcaaatctttgcagtaggtacaacacattattacaatattgtttaataaaccataattaaaagcgctccagccaaaactcatatctgatataatcgcccctgcatgaccatcataccaaagtttaatataaattaaatgacgttccctcaaaaacacactacccacatacatgatctcttttggcatgtgcatattaacaatctgtctgtaccatggacaacgttggttaatcatgcaacccaatataaccttccggaaccacactgccaacaccgctcccccagccatgcattgaagtgaaccctgctgattacaatgacaatgaagaacccaattctctcgaccgtgaatcacttgagaatgaaaaatatctatagtggcacaacatagacataaatgcatgcatcttctcataatttttaactcctcaggatttagaaacatatcccagggaataggaagctcttgcagaacagtaaagctggcagaacaaggaagaccacgaacacaacttacactatgcatagtcatagtatcacaatctggcaacagcgggtggtcttcagtcatagaagctcgggtttcattttcctcacaacgtggtaactgggctctggtgtaagggtgatgtctggcgcatgatgtcgagcgtgcgcgcaaccttgtcataatggagttgcttcctgacattctcgtattttgtatagcaaaacgcggccctggcagaacacactcttcttcgccttctatcctgccgcttagcgtgttccgtgtgatagttcaagtacaaccacactcttaagttggtcaaaagaatgctggcttcagttgtaatcaaaactccatcgcatctaatcgttctgaggaaatcatccaagcaatgcaactggattgtgtttcaagcaggagaggagagggaagagacggaagaaccatgttaatttttattccaaacgatctcgcagtacttcaaattgtagatcgcgcagatggcatctctcgcccccactgtgttggtgaaaaagcacagctagatcaaaagaaatgcgattttcaaggtgctcaacggtggcttccagcaaagcctccacgcgcacatccaagaacaaaagaataccaaaagaaggagcattttctaactcctcaatcatcatattacattcctgcaccattcccagataattttcagctttccagccttgaattattcgtgtcagttcttgtggtaaatccaatccacacattacaaacaggtcccggagggcgccctccaccaccattcttaaacacaccctcataatgacaaaatatcttgctcctgtgtcacctgtagcgaattgagaatggcaacatcaattgacatgcccttggctctaagttcttctttaagttctagttgtaaaaactctctcatattatcaccaaactgcttagccagaagccccccgggaacaagagcaggggacgctacagtgcagtacaagcgcagacctccccaattggctccagcaaaaacaagattggaataagcatattgggaaccgccagtaatatcatcgaagttgctggaaatataatcaggcagagtttcttgtaaaaattgaataaaagaaaaatttgccaaaaaaacattcaaaacctctgggatgcaaatgcaataggttaccgcgctgcgctccaacattgttagttttgaattagtctgcaaaaataaaaaaaaaaacaagcgtcatatcatagtagcctgacgaacagatggataaatcagtctttccatcacaagacaagccacagggtctccagctcgaccctcgtaaaacctgtcatcatgattaaacaacagcaccgaaagttcctcgcggtgaccagcatgaataattcttgatgaagcatacaatccagacatgttagcatcagttaacgagaaaaaacagccaacatagcctttgggtataattatgcttaatcgtaagtatagcaaagccacccctcgcggatacaaagtaaaaggcacaggagaataaaaaatataattatttctctgctgctgttcaggcaacgtcgcccccggtccctctaaatacacatacaaagcctcatcagccatggcttaccagacaaagtacagcgggcacacaaagcacaagctctaaagtgactctccaacctctccacaatatatatatacacaagccctaaactgacgtaatgggagtaaagtgtaaaaaatcccgccaaacccaacacacaccccgaaactgcgtcaccagggaaaagtacagtttcacttccgcaatcccaacaggcgtaacttcctctttctcacggtacgtgatatcccactaacttgcaacgtcattttcccacggtcgcaccgccccttttagccgttaaccccacagccaatcaccacacgatccacactttttaaaatcacctcatttacatattggcaccattccatctataaggtatattatatagataga

SEQ ID NO: 61 - DNA, 34792 bp, Artificial Sequence; identical to SEQ ID NO: 60
  NG-221 virus genome sequence consisting of the EnAd genome with a transgene cassette that encodes an anti-PD-L1 ScFv with a C-terminal His6 tag, inserted in the region BY.

SEQ ID NO: 62 - DNA, 35501 bp, Artificial Sequence
  NG-258 virus genome sequence consisting of a transgene cassette encoding an anti-VEGF full length antibody inserted into the region BY
tctatctatataatataccttatagatggaatggtgccaatatgtaaatgaggtgattttaaaaagtgtggatcgtgtggtgattggctgtggggttaacggctaaaaggggcggtgcgaccgtgggaaaatgacgttttgtgggggtggagtttttttgcaagttgtcgcgggaaatgtgacgcataaaaaggcttttttctcacggaactacttagttttcccacggtatttaacaggaaatgaggtagttttgaccggatgcaagtgaaaattgttgattttcgcgcgaaaactgaatgaggaagtgtttttctgaataatgtggtatttatggcagggtggagtatttgttcagggccaggtagactttgacccattacgtggaggtttcgattaccgtgttttttacctgaatttccgcgtaccgtgtcaaagtcttctgtttttacgtaggtgtcagctgatcgctagggtatttatacctcagggtttgtgtcaagaggccactcttgagtgccagcgagaagagttttctcctctgcgccggcagtttaataataaaaaaatgagagatttgcgatttctgcctcaggaaataatctctgctgagactggaaatgaaatattggagcttgtggtgcacgccctgatgggagacgatccggagccacctgtgcagctttttgagcctcctacgcttcaggaactgtatgatttagaggtagagggatcggaggattctaatgaggaagctgtaaatggcttttttaccgattctatgcttttagctgctaatgaagggttagaattagatccgcctttggacacttttgatactccaggggtaattgtggaaagcggtacaggtgtaagaaaattacctgatttgagttccgtggactgtgatttgcactgctatgaagacgggtttcctccgagtgatgaggaggaccatgaaaaggagcagtccatgcagactgcagcgggtgagggagtgaaggctgccaatgttggttttcagttggattgcccggagcttcctggacatggctgtaagtcttgtgaatttcacaggaaaaatactggagtaaaggaactgttatgttcgctttgttatatgagaacgcactgccactttatttacagtaagtgtgtttaagttaaaatttaaaggaatatgctgtttttcacatgtatattgagtgtgagttttgtgcttcttattataggtcctgtgtctgatgctgatgaatcaccatctcctgattctactacctcacctcctgagattcaagcacctgttcctgtggacgtgcgcaagcccattcctgtgaagcttaagcctgggaaacgtccagcagtggaaaaacttgaggacttgttacagggtggggacggacctttggacttgagtacacggaaacgtccaagacaataagtgttccatatccgtgtttacttaaggtgacgtcaatatttgtgtgacagtgcaatgtaataaaaatatgttaactgttcactggtttttattgctttttgggcggggactcaggtatataagtagaagcagacctgtgtggttagctcataggagctggctttcatccatggaggtttgggccattttggaagaccttaggaagactaggcaactgttagagaacgcttcggacggagtctccggtttttggagattctggttcgctagtgaattagctagggtagtttttaggataaaacaggactataaacaagaatttgaaaagttgttggtagattgcccaggactttttgaagctcttaatttgggccatcaggttcactttaaagaaaaagttttatcagttttagacttttcaaccccaggtagaactgctgctgctgtggcttttcttacttttatattagataaatggatcccgcagactcatttcagcaggggatacgttttggatttcatagccacagcattgtggagaacatggaaggttcgcaagatgaggacaatcttaggttactggccagtgcagcctttgggtgtagcgggaatcctgaggcatccaccggtcatgccagcggttctggaggaggaacagcaagaggacaacccgagagccggcctggaccctccagtggaggaggcggagtagctgacttgtctcctgaactgcaacgggtgcttactggatctacgtccactggacgggataggggcgttaagagggagagggcatctagtggtactgatgctagatctgagttggctttaagtttaatgagtcgcagacgtcctgaaaccatttggtggcatgaggttcagaaagagggaagggatgaagtttctgtattgcaggagaaatattcactggaacaggtgaaaacatgttggttggagcctgaggatgattgggaggtggccattaaaaattatgccaagatagctttgaggcctgataaacagtataagattactagacggattaatatccggaatgcttgttacatatctggaaatggggctgaggtggtaatagatactcaagacaaggcagttattagatgctgcatgatggatatgtggcctggggtagtcggtatggaagcagtaacttttgtaaatgttaagtttaggggagatggttataatggaatagtgtttatggccaataccaaacttatattgcatggttgtagcttttttggtttcaacaatacctgtgtagatgcctggggacaggttagtgtacggggatgtagtttctatgcgtgttggattgccacagctggcagaaccaagagtcaattgtctctgaagaaatgcatatttcaaagatgtaacctgggcattctgaatgaaggcgaagcaagggtccgccactgcgcttctacagatactggatgttttattttgattaagggaaatgccagcgtaaagcataacatgatttgcggtgcttccgatgagaggccttatcaaatgctcacttgtgctggtgggcattgtaatatgctggctactgtgcatattgtttcccatcaacgcaaaaaatggcctgtttttgatcacaatgtgatgacgaagtgtaccatgcatgcaggtgggcgtagaggaatgtttatgccttaccagtgtaacatgaatcatgtgaaagtgttgttggaaccagatgccttttccagaatgagcctaacaggaatttttgacatgaacatgcaaatctggaagatcctgaggtatgatgatacgagatcgagggtacgcgcatgcgaatgcggaggcaagcatgccaggttccagccggtgtgtgtagatgtgactgaagatctcagaccggatcatttggttattgcccgcactggagcagagttcggatccagtggagaagaaactgactaaggtgagtattgggaaaactttggggtgggattttcagatggacagattgagtaaaaatttgttttttctgtcttgcagctgtcatgagtggaaacgcttcttttaaggggggagtcttcagcccttatctgacagggcgtctcccatcctgggcaggagttcgtcagaatgttatgggatctactgtggatggaagacccgtccaacccgccaattcttcaacgctgacctatgctactttaagttcttcacctttggacgcagctgcagctgccgccgccgcttctgttgccgctaacactgtgcttggaatgggttactatggaagcatcatggctaattccacttcctctaataacccttctaccctgactcaggacaagttacttgtccttttggcccagctggaggctttgacccaacgtctgggtgaactttctcagcaggtggtcgagttgcgagtacaaactgagtctgctgtcggcacggcaaagtctaaataaaaaaatcccagaatcaatgaataaataaacaagcttgttgttgatttaaaatcaagtgtttttatttcatttttcgcgcacggtatgccctagaccaccgatctctatcattgagaactcggtggattttttccaggatcctatagaggtgggattgaatgtttagatacatgggcattaggccgtctttggggtggagatagctccattgaagggattcatgctccggggtagtgttgtaaatcacccagtcataacaaggtcgcagtgcatggtgttgcacaatatcttttagaagtaggctgattgccacagataagcccttggtgtaggtgtttacaaaccggttgagctgggatgggtgcattcggggtgaaattatgtgcattttggattggatttttaagttggcaatattgccgccaagatcccgtcttgggttcatgttatgaaggaccaccaagacggtgtatccggtacatttaggaaatttatcgtgcagcttggatggaaaagcgtggaaaaatttggagacacccttgtgtcctccaagattttccatgcactcatccatgataatagcaatggggccgtgggcagcggcgcgggcaaacacgttccgtgggtctgacacatcatagttatgttcctgagttaaatcatcataagccattttaatgaatttggggcggagagtaccagattggggtatgaatgttccttcgggccccggagcatagttcccctcacagatttgcatttcccaagctttcagttccgagggtggaatcatgtccacctggggggctatgaaaaacaccgtttctggggcgggggtgattaattgtgatgatagcaaatttctgagcaattgagatttgccacatccggtggggccataaatgattccgattacgggttgcaggtggtagtttagggaacggcaactgccgtcttctcgaagcaagggggccacctcgttcatcatttcccttacatgcatattttcccgcaccaaatccattaggaggcgctctcctcctagtgatagaagttcttgtagtgaggaaaagtttttcagcggtttcagaccgtcagccatgggcattttggagagagtttgctgcaaaagttctagtctgttccacagttcagtgatgtgttctatggcatctcgatccagcagacctcctcgtttcgcgggtttggacggctcctggaatagggtatgagacgatgggcgtccagcgctgccagggttcggtccttccagggtctcagtgttcgagtcagggttgtttccgtcacagtgaaggggtgtgcgcctgcttgggcgcttgccagggtgcgcttcagactcatcctgctggtcgaaaacttctgtcgcttggcgccctgtatgtcggccaagtagcagtttaccatgagttcgtagttgagcgcctcggctgcgtggcctttggcgcggagcttacctttggaagttttcttgcataccgggcagtataggcatttcagcgcatacaacttgggcgcaaggaaaacggattctggggagtatgcatctgcgccgcaggaggcgcaaacagtttcacattccaccagccaggttaaatccggttcattggggtcaaaaacaagttttccgccatattttttgatgcgtttcttacctttggtctccatgagttcgtgtcctcgttgagtgacaaacaggctgtccgtgtccccgtagactgattttacaggcctcttctccagtggagtgcctcggtcttcttcgtacaggaactctgaccactctgatacaaaggcgcgcgtccaggccagcacaaaggaggctatgtgggaggggtagcgatcgttgtcaaccagggggtccaccttttccaaagtatgcaaacacatgtcaccctcttcaacatccaggaatgtgattggcttgtaggtgtatttcacgtgacctggggtccccgctgggggggtataaaagggggcggttctttgctcttcctcactgtcttccggatcgctgtccaggaacgtcagctgttggggtaggtattccctctcgaaggcgggcatgacctctgcactcaggttgtcagtttctaagaacgaggaggatttgatattgacagtgccggttgagatgcctttcatgaggttttcgtccatctggtcagaaaacacaatttttttattgtcaagtttggtggcaaatgatccatacagggcgttggataaaagtttggcaatggatcgcatggtttggttcttttccttgtccgcgcgctctttggcggcgatgttgagttggacatactcgcgtgccaggcacttccattcggggaagatagttgttaattcatctggcacgattctcacttgccaccctcgattatgcaaggtaattaaatccacactggtggccacctcgcctcgaaggggttcattggtccaacagagcctacctcctttcctagaacagaaagggggaagtgggtctagcataagttcatcgggagggtctgcatccatggtaaagattcccggaagtaaatccttatcaaaatagctgatgggagtggggtcatctaaggccatttgccattctcgagctgccagtgcgcgctcatatgggttaaggggactgccccatggcatgggatgggtgagtgcagaggcatacatgccacagatgtcatagacgtagatgggatcctcaaagatgcctatgtaggttggatagcatcgcccccctctgatacttgctcgcacatagtcatatagttcatgtgatggcgctagcagccccggacccaagttggtgcgattgggtttttctgttctgtagacgatctggcgaaagatggcgtgagaattggaagagatggtgggtctttgaaaaatgttgaaatgggcatgaggtagacctacagagtctctgacaaagtgggcataagattcttgaagcttggttaccagttcggcggtgacaagtacgtctagggcgcagtagtcaagtgtttcttgaatgatgtcataacctggttggtttttcttttcccacagttcgcggttgagaaggtattcttcgcgatccttccagtactcttctagcggaaacccgtctttgtctgcacggtaagatcctagcatgtagaactgattaactgccttgtaagggcagcagcccttctctacgggtagagagtatgcttgagcagcttttcgtagcgaagcgtgagtaagggcaaaggtgtctctgaccatgactttgaggaattggtatttgaagtcgatgtcgtcacaggctccctgttcccagagttggaagtctacccgtttcttgtaggcggggttgggcaaagcgaaagtaacatcattgaagagaatcttgccggccctgggcatgaaattgcgagtgatgcgaaaaggctgtggtacttccgctcggttattgataacctgggcagctaggacgatctcgtcgaaaccgttgatgttgtgtcctacgatgtataattctatgaaacgcggcgtgcctctgacgtgaggtagcttactgagctcatcaaaggttaggtctgtggggtcagataaggcgtagtgttcgagagcccattcgtgcaggtgaggattcgctttaaggaaggaggaccagaggtccactgccagtgctgtttgtaactggtcccggtactgacgaaaatgccgtccgactgccattttttctggggtgacgcaatagaaggtttgggggtcctgccgccagcgatcccacttgagttttatggcgaggtcataggcgatgttgacgagccgctggtctccagagagtttcatgaccagcatgaaggggattagctgcttgccaaaggaccccatccaggtgtaggtttccacatcgtaggtgagaaagagcctttctgtgcgaggatgagagccaatcgggaagaactggatctcctgccaccagttggaggaatggctgttgatgtgatggaagtagaactccctgcgacgcgccgagcattcatgcttgtgcttgtacagacggccgcagtagtcgcagcgttgcacgggttgtatctcgtgaatgagttgtacctggcttcccttgacgagaaatttcagtgggaagccgaggcctggcgattgtatctcgtgctttactatgttgtctgcatcggcctgttcatcttctgtctcgatggtggtcatgctgacgagccctcgcgggaggcaagtccagacctcggcgcggcaggggcggagctcgaggacgagagcgcgcaggctggagctgtccagggtcctgagacgctgcggactcaggttagtaggcagtgtcaggagattaacttgcatgatcttttggagggcgtgcgggaggttcagatagtacttgatctcaacgggtccgttggtggagatgtcgatggcttgcagggttccgtgtcccttgggcgctaccaccgtgcccttgtttttcattttggacggcggtggctctgttgcttcttgcatgtttagaagcggtgtcgagggcgcgcaccgggcggcaggggcggctcgggacccggcggcatggctggcagtggtacgtcggcgccgcgcgcgggtaggttctggtactgcgccctgagaagactcgcatgcgcgacgacgcggcggttgacatcctggatctgacgcctctgggtgaaagctaccggccccgtgagcttgaacctgaaagagagttcaacagaatcaatctcggtatcgttgacggcggcttgcctaaggatttcttgcacgtcaccagagttgtcctggtaggcgatctccgccatgaactgctcgatctcttcctcttgaagatctccgcggcccgctctctcgacggtggccgcgaggtcgttggagatgcgcccaatgagttgagagaatgcattcatgcccgcctcgttccagacgcggctgtagaccacggcccccacgggatctctcgcgcgcatgaccacctgggcgaggttgagctccacgtggcgggtgaagaccgcatagttgcataggcgctggaaaaggtagttgagtgtggtggcgatgtgctcggtgacgaagaaatacatgatccatcgtctcagcggcatctcgctgacatcgcccagagcttccaagcgctccatggcctcgtagaagtccacggcaaaattaaaaaactgggagtttcgcgcggacacggtcaactcctcttccagaagacggataagttcggcgatggtggtgcgcacctcgcgctcgaaagcccctgggatttcttcctcaatctcttcttcttccactaacatctcttcctcttcaggtggggctgcaggaggagggggaacgcggcgacgccggcggcgcacgggcagacggtcgatgaatctttcaatgacctctccgcggcggcggcgcatggtttcagtgacggcgcggccgttctcgcgcggtcgcagagtaaaaacaccgccgcgcatctccttaaagtggtgactgggaggttctccgtttgggagggagagggcgctgattatacattttattaattggcccgtagggactgcacgcagagatctgatcgtgtcaagatccacgggatctgaaaacctttcgacgaaagcgtctaaccagtcacagtcacaaggtaggctgagtacggcttcttgtgggcgggggtggttatgtgttcggtctgggtcttctgtttcttcttcatctcgggaaggtgagacgatgctgctggtgatgaaattaaagtaggcagttctaagacggcggatggtggcgaggagcaccaggtctttgggtccggcttgctggatacgcaggcgattggccattccccaagcattatcctgacatctagcaagatctttgtagtagtcttgcatgagccgttctacgggcacttcttcctcacccgttctgccatgcatacgtgtgagtccaaatccgcgcattggttgtaccagtgccaagtcagctacgactctttcggcgaggatggcttgctgtacttgggtaagggtggcttgaaagtcatcaaaatccacaaagcggtggtaagctcctgtattaatggtgtaagcacagttggccatgactgaccagttaactgtctggtgaccagggcgcacgagctcggtgtatttaaggcgcgaataggcgcgggtgtcaaagatgtaatcgttgcaggtgcgcaccagatactggtaccctataagaaaatgcggcggtggttggcggtagagaggccatcgttctgtagctggagcgccaggggcgaggtcttccaacataaggcggtgatagccgtagatgtacctggacatccaggtgattcctgcggcggtagtagaagcccgaggaaactcgcgtacgcggttccaaatgttgcgtagcggcatgaagtagttcattgtaggcacggtttgaccagtgaggcgcgcgcagtcattgatgctctatagacacggagaaaatgaaagcgttcagcgactcgactccgtagcctggaggaacgtgaacgggttgggtcgcggtgtaccccggttcgagacttgtactcgagccggccggagccgcggctaacgtggtattggcactcccgtctcgacccagcctacaaaaatccaggatacggaatcgagtcgttttgctggtttccgaatggcagggaagtgagtcctattttttttttttgccgctcagatgcatcccgtgctgcgacagatgcgcccccaacaacagcccccctcgcagcagcagcagcagcaatcacaaaaggctgtccctgcaactactgcaactgccgccgtgagcggtgcgggacagcccgcctatgatctggacttggaagagggcgaaggactggcacgtctaggtgcgccttcacccgagcggcatccgcgagttcaactgaaaaaagattctcgcgaggcgtatgtgccccaacagaacctatttagagacagaagcggcgaggagccggaggagatgcgagcttcccgctttaacgcgggtcgtgagctgcgtcacggtttggaccgaagacgagtgttgcgggacgaggatttcgaagttgatgaaatgacagggatcagtcctgccagggcacacgtggctgcagccaaccttgtatcggcttacgagcagacagtaaaggaagagcgtaacttccaaaagtcttttaataatcatgtgcgaaccctgattgcccgcgaagaagttacccttggtttgatgcatttgtgggatttgatggaagctatcattcagaaccctactagcaaacctctgaccgcccagctgtttctggtggtgcaacacagcagagacaatgaggctttcagagaggcgctgctgaacatcaccgaacccgaggggagatggttgtatgatcttatcaacattctacagagtatcatagtgcaggagcggagcctgggcctggccgagaaggtggctgccatcaattactcggttttgagcttgggaaaatattacgctcgcaaaatctacaagactccatacgttcccatagacaaggaggtgaagatagatgggttctacatgcgcatgacgctcaaggtcttgaccctgagcgatgatcttggggtgtatcgcaatgacagaatgcatcgcgcggttagcgccagcaggaggcgcgagttaagcgacagggaactgatgcacagtttgcaaagagctctgactggagctggaaccgagggtgagaattacttcgacatgggagctgacttgcagtggcagcctagtcgcagggctctgagcgccgcgacggcaggatgtgagcttccttacatagaagaggcggatgaaggcgaggaggaagagggcgagtacttggaagactgatggcacaacccgtgttttttgctagatggaacagcaagcaccggatcccgcaatgcgggcggcgctgcagagccagccgtccggcattaactcctcggacgattggacccaggccatgcaacgtatcatggcgttgacgactcgcaaccccgaagcctttagacagcaaccccaggccaaccgtctatcggccatcatggaagctgtagtgccttcccgctctaatcccactcatgagaaggtcctggccatcgtgaacgcgttggtggagaacaaagctattcgtccagatgaggccggactggtatacaacgctctcttagaacgcgtggctcgctacaacagtagcaatgtgcaaaccaatttggaccgtatgataacagatgtacgcgaagccgtgtctcagcgcgaaaggttccagcgtgatgccaacctgggttcgctggtggcgttaaatgctttcttgagtactcagcctgctaatgtgccgcgtggtcaacaggattatactaactttttaagtgctttgagactgatggtatcagaagtacctcagagcgaagtgtatcagtccggtcctgattacttctttcagactagcagacagggcttgcagacggtaaatctgagccaagcttttaaaaaccttaaaggtttgtggggagtgcatgccccggtaggagaaagagcaaccgtgtctagcttgttaactccgaactcccgcctattattactgttggtagctcctttcaccgacagcggtagcatcgaccgtaattcctatttgggttacctactaaacctgtatcgcgaagccatagggcaaagtcaggtggacgagcagacctatcaagaaattacccaagtcagtcgcgctttgggacaggaagacactggcagtttggaagccactctgaacttcttgcttaccaatcggtctcaaaagatccctcctcaatatgctcttactgcggaggaggagaggatccttagatatgtgcagcagagcgtgggattgtttctgatgcaagagggggcaactccgactgcagcactggacatgacagcgcgaaatatggagcccagcatgtatgccagtaaccgacctttcattaacaaactgctggactacttgcacagagctgccgctatgaactctgattatttcaccaatgccatcttaaacccgcactggctgcccccacctggtttctacacgggcgaatatgacatgcccgaccctaatgacggatttctgtgggacgacgtggacagcgatgttttttcacctctttctgatcatcgcacgtggaaaaaggaaggcggcgatagaatgcattcttctgcatcgctgtccggggtcatgggtgctaccgcggctgagcccgagtctgcaagtccttttcctagtctacccttttctctacacagtgtacgtagcagcgaagtgggtagaataagtcgcccgagtttaatgggcgaagaggagtatctaaacgattccttgctcagaccggcaagagaaaaaaatttcccaaacaatggaatagaaagtttggtggataaaatgagtagatggaagacttatgctcaggatcacagagacgagcctgggatcatggggattacaagtagagcgagccgtagacgccagcgccatgacagacagaggggtcttgtgtgggacgatgaggattcggccgatgatagcagcgtgctggacttgggtgggagaggaaggggcaacccgtttgctcatttgcgccctcgcttgggtggtatgttgtaaaaaaaaataaaaaaaaaactcaccaaggccatggcgacgagcgtacgttcgttcttctttattatctgtgtctagtataatgaggcgagtcgtgctaggcggagcggtggtgtatccggagggtcctcctccttcgtacgagagcgtgatgcagcagcagcaggcgacggcggtgatgcaatccccactggaggctccctttgtgcctccgcgatacctggcacctacggagggcagaaacagcattcgttattcggaactggcacctcagtacgataccaccaggttgtatctggtggacaacaagtcggcggacattgcttctctgaactatcagaatgaccacagcaacttcttgaccacggtggtgcaaaacaatgactttacccctacggaagccagcacccagaccattaactttgatgaacgatcgcggtggggcggtcagctaaagaccatcatgcatactaacatgccaaacgtgaacgagtatatgtttagtaacaagttcaaagcgcgtgtgatggtgtccagaaaacctcccgacggtgctgcagttggggatacttatgatcacaagcaggatattttgaaatatgagtggttcgagtttactttgccagaaggcaacttttcagttactatgactattgatttgatgaacaatgccatcatagataattacttgaaagtgggtagacagaatggagtgcttgaaagtgacattggtgttaagttcgacaccaggaacttcaagctgggatgggatcccgaaaccaagttgatcatgcctggagtgtatacgtatgaagccttccatcctgacattgtcttactgcctggctgcggagtggattttaccgagagtcgtttgagcaaccttcttggtatcagaaaaaaacagccatttcaagagggttttaagattttgtatgaagatttagaaggtggtaatattccggccctcttggatgtagatgcctatgagaacagtaagaaagaacaaaaagccaaaatagaagctgctacagctgctgcagaagctaaggcaaacatagttgccagcgactctacaagggttgctaacgctggagaggtcagaggagacaattttgcgccaacacctgttccgactgcagaatcattattggccgatgtgtctgaaggaacggacgtgaaactcactattcaacctgtagaaaaagatagtaagaatagaagctataatgtgttggaagacaaaatcaacacagcctatcgcagttggtatctttcgtacaattatggcgatcccgaaaaaggagtgcgttcctggacattgctcaccacctcagatgtcacctgcggagcagagcaggtctactggtcgcttccagacatgatgaaggatcctgtcactttccgctccactagacaagtcagtaactaccctgtggtgggtgcagagcttatgcccgtcttctcaaagagcttctacaacgaacaagctgtgtactcccagcagctccgccagtccacctcgcttacgcacgtcttcaaccgctttcctgagaaccagattttaatccgtccgccggcgcccaccattaccaccgtcagtgaaaacgttcctgctctcacagatcacgggaccctgccgttgcgcagcagtatccggggagtccaacgtgtgaccgttactgacgccagacgccgcacctgtccctacgtgtacaaggcactgggcatagtcgcaccgcgcgtcctttcaagccgcactttctaaaaaaaaaaaaaatgtccattcttatctcgcccagtaataacaccggttggggtctgcgcgctccaagcaagatgtacggaggcgcacgcaaacgttctacccaacatcctgtccgtgttcgcggacattttcgcgctccatggggcgccctcaagggccgcactcgcgttcgaaccaccgtcgatgatgtaatcgatcaggtggttgccgacgcccgtaattatactcctactgcgcctacatctactgtggatgcagttattgacagtgtagtggctgacgctcgcaactatgctcgacgtaagagccggcgaaggcgcattgccagacgccaccgagctaccactgccatgcgagccgcaagagctctgctacgaagagctagacgcgtggggcgaagagccatgcttagggcggccagacgtgcagcttcgggcgccagcgccggcaggtcccgcaggcaagcagccgctgtcgcagcggcgactattgccgacatggcccaatcgcgaagaggcaatgtatactgggtgcgtgacgctgccaccggtcaacgtgtacccgtgcgcacccgtccccctcgcacttagaagatactgagcagtctccgatgttgtgtcccagcggcgaggatgtccaagcgcaaatacaaggaagaaatgctgcaggttatcgcacctgaagtctacggccaaccgttgaaggatgaaaaaaaaccccgcaaaatcaagcgggttaaaaaggacaaaaaagaagaggaagatggcgatgatgggctggcggagtttgtgcgcgagtttgccccacggcgacgcgtgcaatggcgtgggcgcaaagttcgacatgtgttgagacctggaacttcggtggtctttacacccggcgagcgttcaagcgctacttttaagcgttcctatgatgaggtgtacggggatgatgatattcttgagcaggcggctgaccgattaggcgagtttgcttatggcaagcgtagtagaataacttccaaggatgagacagtgtcgatacccttggatcatggaaatcccacccctagtcttaaaccggtcactttgcagcaagtgttacccgtaactccgcgaacaggtgttaaacgcgaaggtgaagatttgtatcccactatgcaactgatggtacccaaacgccagaagttggaggacgttttggagaaagtaaaagtggatccagatattcaacctgaggttaaagtgagacccattaagcaggtagcgcctggtctgggggtacaaactgtagacattaagattcccactgaaagtatggaagtgcaaactgaacccgcaaagcctactgccacctccactgaagtgcaaacggatccatggatgcccatgcctattacaactgacgccgccggtcccactcgaagatcccgacgaaagtacggtccagcaagtctgttgatgcccaattatgttgtacacccatctattattcctactcctggttaccgaggcactcgctactatcgcagccgaaacagtacctcccgccgtcgccgcaagacacctgcaaatcgcagtcgtcgccgtagacgcacaagcaaaccgactcccggcgccctggtgcggcaagtgtaccgcaatggtagtgcggaacctttgacactgccgcgtgcgcgttaccatccgagtatcatcacttaatcaatgttgccgctgcctccttgcagatatggccctcacttgtcgccttcgcgttcccatcactggttaccgaggaagaaactcgcgccgtagaagagggatgttgggacgcggaatgcgacgctacaggcgacggcgtgctatccgcaagcaattgcggggtggttttttaccagccttaattccaattatcgctgctgcaattggcgcgataccaggcatagcttccgtggcggttcaggcctcgcaacgacattgacattggaaaaaaacgtataaataaaaaaaaaaaaatacaatggactctgacactcctggtcctgtgactatgttttcttagagatggaagacatcaatttttcatccttggctccgcgacacggcacgaagccgtacatgggcacctggagcgacatcggcacgagccaactgaacgggggcgccttcaattggagcagtatctggagcgggcttaaaaattttggctcaaccataaaaacatacgggaacaaagcttggaacagcagtacaggacaggcgcttagaaataaacttaaagaccagaacttccaacaaaaagtagtcgatgggatagcttccggcatcaatggagtggtagatttggctaaccaggctgtgcagaaaaagataaacagtcgtttggacccgccgccagcaaccccaggtgaaatgcaagtggaggaagaaattcctccgccagaaaaacgaggcgacaagcgtccgcgtcccgatttggaagagacgctggtgacgcgcgtagatgaaccgccttcttatgaggaagcaacgaagcttggaatgcccaccactagaccgatagccccaatggccaccggggtgatgaaaccttctcagttgcatcgacccgtcaccttggatttgccccctccccctgctgctactgctgtacccgcttctaagcctgtcgctgccccgaaaccagtcgccgtagccaggtcacgtcccgggggcgctcctcgtccaaatgcgcactggcaaaatactctgaacagcatcgtgggtctaggcgtgcaaagtgtaaaacgccgtcgctgcttttaattaaatatggagtagcgcttaacttgcctatctgtgtatatgtgtcattacacgccgtcacagcagcagaggaaaaaaggaagaggtcgtgcgtcgacgctgagttactttcaagatggccaccccatcgatgctgccccaatgggcatacatgcacatcgccggacaggatgcttcggagtacctgagtccgggtctggtgcagttcgcccgcgccacagacacctacttcaatctgggaaataagtttagaaatcccaccgtagcgccgacccacgatgtgaccaccgaccgtagccagcggctcatgttgcgcttcgtgcccgttgaccgggaggacaatacatactcttacaaagtgcggtacaccctggccgtgggcgacaacagagtgctggatatggccagcacgttctttgacattaggggtgtgttggacagaggtcccagtttcaaaccctattctggtacggcttacaactccctggctcctaaaggcgctccaaatacatctcagtggattgcagaaggtgtaaaaaatacaactggtgaggaacacgtaacagaagaggaaaccaatactactacttacacttttggcaatgctcctgtaaaagctgaagctgaaattacaaaagaaggactcccagtaggtttggaagtttcagatgaagaaagtaaaccgatttatgctgataaaacatatcagccagaacctcagctgggagatgaaacttggactgaccttgatggaaaaaccgaaaagtatggaggcagggctctcaaacccgatactaagatgaaaccatgctacgggtcctttgccaaacctactaatgtgaaaggcggtcaggcaaaacaaaaaacaacggagcagccaaatcagaaagtcgaatatgatatcgacatggagttttttgatgcggcatcgcagaaaacaaacttaagtcctaaaattgtcatgtatgcagaaaatgtaaatttggaaactccagacactcatgtagtgtacaaacctggaacagaagacacaagttccgaagctaatttgggacaacaatctatgcccaacagacccaactacattggcttcagagataactttattggacttatgtactataacagtactggtaacatgggggtgctggctggtcaagcgtctcagttaaatgcagtggttgacttgcaggacagaaacacagaactttcttaccaactcttgcttgactctctgggcgacagaaccagatactttagcatgtggaatcaggctgtggacagttatgatcctgatgtacgtgttattgaaaatcatggtgtggaagatgaacttcccaactactgttttccactggacggcataggtgttccaacaaccagttacaaatcaatagttccaaatggagacaatgcgcctaattggaaggaacctgaagtaaatggaacaagtgagatcggacagggtaatttgtttgccatggaaattaaccttcaagccaatctatggcgaagtttcctttattccaatgtggctctatatctcccagactcgtacaaatacaccccgtccaatgtcactcttccagaaaacaaaaacacctacgactacatgaacgggcgggtggtgccgccatctctagtagacacctatgtgaacattggtgccaggtggtctctggatgccatggacaatgtcaacccattcaaccaccaccgtaacgctggcttgcgttaccgatccatgcttctgggtaacggacgttatgtgcctttccacatacaagtgcctcaaaaattcttcgctgttaaaaacctgctgcttctcccaggctcctacacttatgagtggaactttaggaaggatgtgaacatggttctacagagttccctcggtaacgacctgcgggtagatggcgccagcatcagtttcacgagcatcaacctctatgctacttttttccccatggctcacaacaccgcttccacccttgaagccatgctgcggaatgacaccaatgatcagtcattcaacgactacctatctgcagctaacatgctctaccccattcctgccaatgcaaccaatattcccatttccattccttctcgcaactgggcggctttcagaggctggtcatttaccagactgaaaaccaaagaaactccctctttggggtctggatttgacccctactttgtctattctggttctattccctacctggatggtaccttctacctgaaccacacttttaagaaggtttccatcatgtttgactcttcagtgagctggcctggaaatgacaggttactatctcctaacgaatttgaaataaagcgcactgtggatggcgaaggctacaacgtagcccaatgcaacatgaccaaagactggttcttggtacagatgctcgccaactacaacatcggctatcagggcttctacattccagaaggatacaaagatcgcatgtattcatttttcagaaacttccagcccatgagcaggcaggtggttgatgaggtcaattacaaagacttcaaggccgtcgccataccctaccaacacaacaactctggctttgtgggttacatggctccgaccatgcgccaaggtcaaccctatcccgctaactatccctatccactcattggaacaactgccgtaaatagtgttacgcagaaaaagttcttgtgtgacagaaccatgtggcgcataccgttctcgagcaacttcatgtctatgggggcccttacagacttgggacagaatatgctctatgccaactcagctcatgctctggacatgacctttgaggtggatcccatggatgagcccaccctgctttatcttctcttcgaagttttcgacgtggtcagagtgcatcagccacaccgcggcatcatcgaggcagtctacctgcgtacaccgttctcggccggtaacgctaccacgtaagaagcttcttgcttcttgcaaatagcagctgcaaccatggcctgcggatcccaaaacggctccagcgagcaagagctcagagccattgtccaagacctgggttgcggaccctattttttgggaacctacgataagcgcttcccggggttcatggcccccgataagctcgcctgtgccattgtaaatacggccggacgtgagacggggggagagcactggttggctttcggttggaacccacgttctaacacctgctacctttttgatccttttggattctcggatgatcgtctcaaacagatttaccagtttgaatatgagggtctcctgcgccgcagcgctcttgctaccaaggaccgctgtattacgctggaaaaatctacccagaccgtgcagggtccccgttctgccgcctgcggacttttctgctgcatgttccttcacgcctttgtgcactggcctgaccgtcccatggacggaaaccccaccatgaaattgctaactggagtgccaaacaacatgcttcattctcctaaagtccagcccaccctgtgtgacaatcaaaaagcactctaccattttcttaatacccattcgccttattttcgctcccatcgtacacacatcgaaagggccactgcgttcgaccgtatggatgttcaataatgactcatgtaaacaacgtgttcaataaacatcactttatttttttacatgtatcaaggctctgcattacttatttatttacaagtcgaatgggttctgacgagaatcagaatgacccgcaggcagtgatacgttgcggaactgatacttgggttgccacttgaattcgggaatcaccaacttgggaaccggtatatcgggcaggatgtcactccacagctttctggtcagctgcaaagctccaagcaggtcaggagccgaaatcttgaaatcacaattaggaccagtgctttgagcgcgagagttgcggtacaccggattgcagcactgaaacaccatcagcgacggatgtctcacgcttgccagcacggtgggatctgcaatcatgcccacatccagatcttcagcattggcaatgctgaacggggtcatcttgcaggtctgcctacccatggcgggcacccaattaggcttgtggttgcaatcgcagtgcagggggatcagtatcatcttggcctgatcctgtctgattcctggatacacggctctcatgaaagcatcatattgcttgaaagcctgctgggctttactaccctcggtataaaacatcccgcaggacctgctcgaaaactggttagctgcacagccggcatcattcacacagcagcgggcgtcattgttagctatttgcaccacacttctgccccagcggttttgggtgattttggttcgctcgggattctcctttaaggctcgttgtccgttctcgctggccacatccatctcgataatctgctccttctgaatcataatattgccatgcaggcacttcagcttgccctcataatcattgcagccatgaggccacaacgcacagcctgtacattcccaattatggtgggcgatctgagaaaaagaatgtatcattccctgcagaaatcttcccatcatcgtgctcagtgtcttgtgactagtgaaagttaactggatgcctcggtgctcctcgtttacgtactggtgacagatgcgcttgtattgttcgtgttgctcaggcattagtttaaaagaggttctaagttcgttatccagcctgtacttctccatcagcagacacatcacttccatgcctttctcccaagcagacaccaggggcaagctaatcggattcttaacagtgcaggcagcagctcctttagccagagggtcatctttagcgatcttctcaatgcttcttttgccatccttctcaacgatgcgcacgggcgggtagctgaaacccactgctacaagttgcgcctcttctctttcttcttcgctgtcttgactgatgtcttgcatggggatatgtttggtcttccttggcttctttttggggggtatcggaggaggaggactgtcgctccgttccggagacagggaggattgtgacgtttcgctcaccattaccaactgactgtcggtagaagaacctgaccccacacggcgacaggtgtttctcttcgggggcagaggtggaggcgattgcgaagggctgcggtccgacctggaaggcggatgactggcagaaccccttccgcgttcgggggtgtgctccctgtggcggtcgcttaactgatttccttcgcggctggccattgtgttctcctaggcagagaaacaacagacatggaaactcagccattgctgtcaacatcgccacgagtgccatcacatctcgtcctcagcgacgaggaaaaggagcagagcttaagcattccaccgcccagtcctgccaccacctctaccctagaagataaggaggtcgacgcatctcatgacatgcagaataaaaaagcgaaagagtctgagacagacatcgagcaagacccgggctatgtgacaccggtggaacacgaggaagagttgaaacgctttctagagagagaggatgaaaactgcccaaaacaacgagcagataactatcaccaagatgctggaaatagggatcagaacaccgactacctcatagggcttgacggggaagacgcgctccttaaacatctagcaagacagtcgctcatagtcaaggatgcattattggacagaactgaagtgcccatcagtgtggaagagctcagccgcgcctacgagcttaacctcttttcacctcgtactccccccaaacgtcagccaaacggcacctgcgagccaaatcctcgcttaaacttttatccagcttttgctgtgccagaagtactggctacctatcacatcttttttaaaaatcaaaaaattccagtctcctgccgcgctaatcgcacccgcgccgatgccctactcaatctgggacctggttcacgcttacctgatatagcttccttggaagaggttccaaagatcttcgagggtctgggcaataatgagactcgggccgcaaatgctctgcaaaagggagaaaatggcatggatgagcatcacagcgttctggtggaattggaaggcgataatgccagactcgcagtactcaagcgaagcatcgaggtcacacacttcgcatatcccgctgtcaacctgccccctaaagtcatgacggcggtcatggaccagttactcattaagcgcgcaagtcccctttcagaagacatgcatgacccagatgcctgtgatgagggtaaaccagtggtcagtgatgagcagctaacccgatggctgggcaccgactctcccagggatttggaagagcgtcgcaagcttatgatggccgtggtgctggttaccgtagaactagagtgtctccgacgtttctttaccgattcagaaaccttgcgcaaactcgaagagaatctgcactacacttttagacacggctttgtgcggcaggcatgcaagatatctaacgtggaactcaccaacctggtttcctacatgggtattctgcatgagaatcgcctaggacaaagcgtgctgcacagcaccctgaagggggaagcccgccgtgattacatccgcgattgtgtctatctgtacctgtgccacacgtggcaaaccggcatgggtgtatggcagcaatgtttagaagaacagaacttgaaagagcttgacaagctcttacagaaatctcttaaggttctgtggacagggttcgacgagcgcaccgtcgcttccgacctggcagacctcatcttcccagagcgtctcagggttactttgcgaaacggattgcctgactttatgagccagagcatgcttaacaattttcgctctttcatcctggaacgctccggtatcctgcccgccacctgctgcgcactgccctccgactttgtgcctctcacctaccgcgagtgccccccgccgctatggagtcactgctacctgttccgtctggccaactatctctcctaccactcggatgtgatcgaggatgtgagcggagacggcttgctggagtgtcactgccgctgcaatctgtgcacgccccaccggtccctagcttgcaacccccagttgatgagcgaaacccagataataggcacctttgaattgcaaggccccagcagccaaggcgatgggtcttctcctgggcaaagtttaaaactgaccccgggactgtggacctccgcctacttgcgcaagtttgctccggaagattaccacccctatgaaatcaagttctatgaggaccaatcacagcctccaaaggccgaactttcggcctgcgtcatcacccagggggcaattctggcccaattgcaagccatccaaaaatcccgccaagaatttctactgaaaaagggtaagggggtctaccttgacccccagaccggcgaggaactcaacacaaggttccctcaggatgtcccaacgacgagaaaacaagaagttgaaggtgcagccgccgcccccagaagatatggaggaagattgggacagtcaggcagaggaggcggaggaggacagtctggaggacagtctggaggaagacagtttggaggaggaaaacgaggaggcagaggaggtggaagaagtaaccgccgacaaacagttatcctcggctgcggagacaagcaacagcgctaccatctccgctccgagtcgaggaacccggcggcgtcccagcagtagatgggacgagaccggacgcttcccgaacccaaccagcgcttccaagaccggtaagaaggatcggcagggatacaagtcctggcgggggcataagaatgccatcatctcctgcttgcatgagtgcgggggcaacatatccttcacgcggcgctacttgctattccaccatggggtgaactttccgcgcaatgttttgcattactaccgtcacctccacagcccctactatagccagcaaatcccggcagtctcgacagataaagacagcggcggcgacctccaacagaaaaccagcagcggcagttagaaaatacacaacaagtgcagcaacaggaggattaaagattacagccaacgagccagcgcaaacccgagagttaagaaatcggatctttccaaccctgtatgccatcttccagcagagtcggggtcaagagcaggaactgaaaataaaaaaccgatctctgcgttcgctcaccagaagttgtttgtatcacaagagcgaagatcaacttcagcgcactctcgaggacgccgaggctctcttcaacaagtactgcgcgctgactcttaaagagtaggcagcgaccgcgcttattcaaaaaaggcgggaattacatcatcctcgacatgagtaaagaaattcccacgccttacatgtggagttatcaaccccaaatgggattggcggcaggcgcctcccaggactactccacccgcatgaattggctcagcgccgggccttctatgatttctcgagttaatgatatacgcgcctaccgaaaccaaatacttttggaacagtcagctcttaccaccacgccccgccaacaccttaatcccagaaattggcccgccgccctagtgtaccaggaaagtcccgctcccaccactgtattacttcctcgagacgcccaggccgaagtccaaatgactaatgcaggtgcgcagttagctggcggctccaccctatgtcgtcacaggcctcggcataatataaaacgcctgatgatcagaggccgaggtatccagctcaacgacgagtcggtgagctctccgcttggtctacgaccagacggaatctttcagattgccggctgcgggagatcttccttcacccctcgtcaggctgttctgactttggaaagttcgtcttcgcaaccccgctcgggcggaatcgggaccgttcaatttgtggaggagtttactccctctgtctacttcaaccccttctccggatctcctgggcattacccggacgagttcataccgaacttcgacgcgattagcgagtcagtggacggctacgattgatgtctggtgacgcggctgagctatctcggctgcgacatctagaccactgccgccgctttcgctgctttgcccgggaactcattgagttcatctacttcgaactccccaaggatcaccctcaaggtccggcccacggagtgcggatttctatcgaaggcaaaatagactctcgcctgcaacgaattttctcccagcggcccgtgctgatcgagcgagaccagggaaacaccacggtttccatctactgcatttgtaatcaccccggattgcatgaaagcctttgctgtcttatgtgtactgagtttaataaaaactgaattaagactctcctacggactgccgcttcttcaacccggattttacaaccagaagaacgaaacttttcctgtcgtccaggactctgttaacttcacctttcctactcacaaactagaagctcaacgactacaccgcttttccagaagcattttccctactaatactactttcaaaaccggaggtgagctccaaggtcttcctacagaaaacccttgggtggaagcgggccttgtagtgctaggaattcttgcgggtgggcttgtgattattctttgctacctatacacaccttgcttcactttcttagtggtgttgtggtattggtttaaaaaatggggcccatactagtcttgcttgttttactttcgcttttggaaccgggttctgccaattacgatccatgtctagacttcgacccagaaaactgcacacttacttttgcacccgacacaagccgcatctgtggagttcatcgcctctcttacgaacttggcccccaacgacaaaaatttacctgcatggtgggaatcaaccccatagttatcacccagcaaagtggagatactaagggttgcattcactgctcctgcgattccatcgagtgcacctacaccctgctgaagaccctatgcggcctaagagacctgctaccaatgaattaaaaaatgattaataaaaaatcacttactgcggccgctatggccggcctgaaatcagcaataaggtctctgttgaaattttctcccagcagcacctcacttccctcttcccaactctggtattctaaaccccgttcagcggcatactttctccatactttaaaggggatgtcaaattttagctcctctcctgtacccacaatcttcatgtctttcttcccagatgaccaagagagtccggctcagtgactccttcaaccctgtctacccctatgaagatgaaagcacctcccaacacccctttataaacccagggtttatttccccaaatggcttcacacaaagcccaaacggagttcttactttaaaatgtttaaccccactaacaaccacaggcggatctctacagctaaaagtgggagggggacttacagtggatgacaccaacggttttttgaaagaaaacataagtgccaccacaccactcgttaagactggtcactctataggtttaccactaggagccggattgggaacgaatgaaaataaactttgtatcaaattaggacaaggacttacattcaattcaaacaacatttgcattgatgacaatattaacaccttatggacaggagtcaaccccaccgaagccaactgtcaaatcatgaactccagtgaatctaatgattgcaaattaattctaacactagttaaaactggagcactagtcactgcatttgtttatgttataggagtatctaacaattttaatatgctaactacacacagaaatataaattttactgcagagctgtttttcgattctactggtaatttactaactagactctcatccctcaaaactccacttaatcataaatcaggacaaaacatggctactggtgccattactaatgctaaaggtttcatgcccagcacgactgcctatcctttcaatgataattctagagaaaaagaaaactacatttacggaacttgttactacacagctagtgatcgcactgcttttcccattgacatatctgtcatgcttaaccgaagagcaataaatgacgagacatcatattgtattcgtataacttggtcctggaacacaggagatgccccagaggtgcaaacctctgctacaaccctagtcacctccccatttaccttttactacatcagagaagacgactgacaaataaagtttgcgatcgcggctcccgccagatctagtaatcaattacggggtcattagttcatagcccatatatggagttccgcgttacataacttacggtaaatggcccgcctggctgaccgcccaacgacccccgcccattgacgtcaataatgacgtatgttcccatagtaacgccaatagggactttccattgacgtcaatgggtggagtatttacggtaaactgcccacttggcagtacatcaagtgtatcatatgccaagtacgccccctattgacgtcaatgacggtaaatggcccgcctggcattatgcccagtacatgaccttatgggactttcctacttggcagtacatctacgtattagtcatcgctattaccatgctgatgcggttttggcagtacatcaatgggcgtggatagcggtttgactcacggggatttccaagtctccaccccattgacgtcaatgggagtttgttttggcaccaaaatcaacgggactttccaaaatgtcgtaacaactccgccccattgacgcaaatgggcggtaggcgtgtacggtgggaggtctatataagcagagctggtttagtgaaccgtcagatcagatctttgtcgatcctaccatccactcgacacacccgccagcggccgctgccaagcttccgagctctcgaattcaaaggaggtacccaccatgggatggagctgtatcatcctcttcttggtagcaacagctacaggtgtccactccgaggttcagctggtggagtctggcggtggcctggtgcagccagggggctcactccgtttgtcctgtgcagcttctggctataccttcaccaactatggtatgaactgggtccgtcaggccccgggtaagggcctggaatgggttggatggattaacacctataccggtgaaccgacctatgctgcggatttcaaacgtcgttttactttttctctggacacctccaagagcacagcttacctgcagatgaacagcctgcgcgctgaggacactgccgtctattactgtgcaaagtacccgcactattatgggagcagccactggtatttcgacgtctggggtcaaggaaccctggtcaccgtctcctcggcctccaccaagggcccatcggtcttccccctggcaccctcctccaagagcacctctgggggcacagcggccctgggctgcctggtcaaggactacttccccgaaccggtgacggtgtcgtggaactcaggcgccctgaccagcggcgtgcacaccttcccggctgtcctacagtcctcaggactctactccctcagcagcgtggtgaccgtgccctccagcagcttgggcacccagacctacatctgcaacgtgaatcacaagcccagcaacaccaaggtcgacaagaaagttgagcccaaatcttgtgacaaaactcacacatgcccaccgtgcccagcacctgagctcctggggggaccgtcagtcttcctcttccccccaaaacccaaggacaccctcatgatctcccggacccctgaggtcacatgcgtggtggtggacgtgagccacgaagaccctgaggtcaagttcaactggtacgtggacggcgtggaggtgcataatgccaagacaaagccgcgggaggagcagtacaacagcacgtaccgtgtggtcagcgtcctcaccgtcctgcaccaggactggctgaatggcaaggagtacaagtgcaaggtctccaacaaagccctcccagcccccatcgagaaaaccatctccaaagccaaagggcagccccgagaaccacaggtgtacaccctgcccccatcccgggaggagatgaccaagaaccaggtcagcctgacctgcctggtcaaaggcttctatcccagcgacatcgccgtggagtgggagagcaatgggcagccggagaacaactacaagaccacgcctcccgtgctggactccgacggctccttcttcctctacagcaagctcaccgtggacaagagcaggtggcagcaggggaacgtcttctcatgctccgtgatgcacgaggctctgcacaaccactacacgcagaagagcctctccctgtctccgggtaaaggaagcggagctactaacttcagcctgctgaagcaggctggagacgtggaggagaaccctggacctgactggacctggcgcgtgttttgcctgctcgccgtggctcctggggcccacagcgatatccagatgacccagtccccgagctccctgtccgcctctgtgggcgatagggtcaccatcacctgcagcgcaagtcaggatattagcaactatttaaactggtatcaacagaaaccaggaaaagctccgaaagtcctgatttacttcacctcctctctccactctggagtcccttctcgcttctctggatccggttctgggacggatttcactctgaccatcagcagtctgcagccagaagacttcgcaacttattactgtcaacagtatagcaccgtgccgtggacgtttggacagggtaccaaggtggagatcaaacgaactgtggctgcaccatctgtcttcatcttcccgccatctgatgagcagttgaaatctggaactgcttctgttgtgtgcctgctgaataacttctatcccagagaggccaaagtacagtggaaggtggataacgccctccaatcgggtaactcccaggagagtgtcacagagcaggacagcaaggacagcacctacagcctcagcagcaccctgacgctgagcaaagcagactacgagaaacacaaagtctacgcctgcgaagtcacccatcagggcctgagctcgcccgtcacaaagagcttcaacaggggagagtgttaagctagcttgactgactgagatacagcgtaccttcagctcacagacatgataagatacattgatgagtttggacaaaccacaactagaatgcagtgaaaaaaatgctttatttgtgaaatttgtgatgctattgctttatttgtaaccattataagctgcaataaacaagttaacaacaacaattgcattcattttatgtttcaggttcagggggaggtgtgggaggttttttaaagcaagtaaaacctctacaaatgtggtagtcgtcagctatcctgcaggaacttgtttatttgaaaatcaattcacaaaatccgagtagttattttgcctcccccttcccatttaacagaatacaccaatctctccccacgcacagctttaaacatttggataccattagatatagacatggttttagattccacattccaaacagtttcagagcgagccaatctggggtcagtgatagataaaaatccatcgggatagtcttttaaagcgctttcacagtccaactgctgcggatgcgactccggagtctggatcacggtcatctggaagaagaacgatgggaatcataatccgaaaacggtatcggacgattgtgtctcatcaaacccacaagcagccgctgtctgcgtcgctccgtgcgactgctgtttatgggatcagggtccacagtgtcctgaagcatgattttaatagcccttaacatcaactttctggtgcgatgcgcgcagcaacgcattctgatttcactcaaatctttgcagtaggtacaacacattattacaatattgtttaataaaccataattaaaagcgctccagccaaaactcatatctgatataatcgcccctgcatgaccatcataccaaagtttaatataaattaaatgacgttccctcaaaaacacactacccacatacatgatctcttttggcatgtgcatattaacaatctgtctgtaccatggacaacgttggttaatcatgcaacccaatataaccttccggaaccacactgccaacaccgctcccccagccatgcattgaagtgaaccctgctgattacaatgacaatgaagaacccaattctctcgaccgtgaatcacttgagaatgaaaaatatctatagtggcacaacatagacataaatgcatgcatcttctcataatttttaactcctcaggatttagaaacatatcccagggaataggaagctcttgcagaacagtaaagctggcagaacaaggaagaccacgaacacaacttacactatgcatagtcatagtatcacaatctggcaacagcgggtggtcttcagtcatagaagctcgggtttcattttcctcacaacgtggtaactgggctctggtgtaagggtgatgtctggcgcatgatgtcgagcgtgcgcgcaaccttgtcataatggagttgcttcctgacattctcgtattttgtatagcaaaacgcggccctggcagaacacactcttcttcgccttctatcctgccgcttagcgtgttccgtgtgatagttcaagtacaaccacactcttaagttggtcaaaagaatgctggcttcagttgtaatcaaaactccatcgcatctaatcgttctgaggaaatcatccaagcaatgcaactggattgtgtttcaagcaggagaggagagggaagagacggaagaaccatgttaatttttattccaaacgatctcgcagtacttcaaattgtagatcgcgcagatggcatctctcgcccccactgtgttggtgaaaaagcacagctagatcaaaagaaatgcgattttcaaggtgctcaacggtggcttccagcaaagcctccacgcgcacatccaagaacaaaagaataccaaaagaaggagcattttctaactcctcaatcatcatattacattcctgcaccattcccagataattttcagctttccagccttgaattattcgtgtcagttcttgtggtaaatccaatccacacattacaaacaggtcccggagggcgccctccaccaccattcttaaacacaccctcataatgacaaaatatcttgctcctgtgtcacctgtagcgaattgagaatggcaacatcaattgacatgcccttggctctaagttcttctttaagttctagttgtaaaaactctctcatattatcaccaaactgcttagccagaagccccccgggaacaagagcaggggacgctacagtgcagtacaagcgcagacctccccaattggctccagcaaaaacaagattggaataagcatattgggaaccgccagtaatatcatcgaagttgctggaaatataatcaggcagagtttcttgtaaaaattgaataaaagaaaaatttgccaaaaaaacattcaaaacctctgggatgcaaatgcaataggttaccgcgctgcgctccaacattgttagttttgaattagtctgcaaaaataaaaaaaaaaacaagcgtcatatcatagtagcctgacgaacagatggataaatcagtctttccatcacaagacaagccacagggtctccagctcgaccctcgtaaaacctgtcatcatgattaaacaacagcaccgaaagttcctcgcggtgaccagcatgaataattcttgatgaagcatacaatccagacatgttagcatcagttaacgagaaaaaacagccaacatagcctttgggtataattatgcttaatcgtaagtatagcaaagccacccctcgcggatacaaagtaaaaggcacaggagaataaaaaatataattatttctctgctgctgttcaggcaacgtcgcccccggtccctctaaatacacatacaaagcctcatcagccatggcttaccagacaaagtacagcgggcacacaaagcacaagctctaaagtgactctccaacctctccacaatatatatatacacaagccctaaactgacgtaatgggagtaaagtgtaaaaaatcccgccaaacccaacacacaccccgaaactgcgtcaccagggaaaagtacagtttcacttccgcaatcccaacaggcgtaacttcctctttctcacggtacgtgatatcccactaacttgcaacgtcattttcccacggtcgcaccgccccttttagccgttaaccccacagccaatcaccacacgatccacactttttaaaatcacctcatttacatattggcaccattccatctataaggtatattatatagataga

SEQ ID NO: 63 - DNA, 32364 bp, Artificial Sequence
  NG-185 virus genome sequence consisting of the EnAd genome with unique restriction sites inserted into the BX and BY regions.
tctatctatataatataccttatagatggaatggtgccaatatgtaaatgaggtgattttaaaaagtgtggatcgtgtggtgattggctgtggggttaacggctaaaaggggcggtgcgaccgtgggaaaatgacgttttgtgggggtggagtttttttgcaagttgtcgcgggaaatgtgacgcataaaaaggcttttttctcacggaactacttagttttcccacggtatttaacaggaaatgaggtagttttgaccggatgcaagtgaaaattgttgattttcgcgcgaaaactgaatgaggaagtgtttttctgaataatgtggtatttatggcagggtggagtatttgttcagggccaggtagactttgacccattacgtggaggtttcgattaccgtgttttttacctgaatttccgcgtaccgtgtcaaagtcttctgtttttacgtaggtgtcagctgatcgctagggtatttatacctcagggtttgtgtcaagaggccactcttgagtgccagcgagaagagttttctcctctgcgccggcagtttaataataaaaaaatgagagatttgcgatttctgcctcaggaaataatctctgctgagactggaaatgaaatattggagcttgtggtgcacgccctgatgggagacgatccggagccacctgtgcagctttttgagcctcctacgcttcaggaactgtatgatttagaggtagagggatcggaggattctaatgaggaagctgtaaatggcttttttaccgattctatgcttttagctgctaatgaagggttagaattagatccgcctttggacacttttgatactccaggggtaattgtggaaagcggtacaggtgtaagaaaattacctgatttgagttccgtggactgtgatttgcactgctatgaagacgggtttcctccgagtgatgaggaggaccatgaaaaggagcagtccatgcagactgcagcgggtgagggagtgaaggctgccaatgttggttttcagttggattgcccggagcttcctggacatggctgtaagtcttgtgaatttcacaggaaaaatactggagtaaaggaactgttatgttcgctttgttatatgagaacgcactgccactttatttacagtaagtgtgtttaagttaaaatttaaaggaatatgctgtttttcacatgtatattgagtgtgagttttgtgcttcttattataggtcctgtgtctgatgctgatgaatcaccatctcctgattctactacctcacctcctgagattcaagcacctgttcctgtggacgtgcgcaagcccattcctgtgaagcttaagcctgggaaacgtccagcagtggaaaaacttgaggacttgttacagggtggggacggacctttggacttgagtacacggaaacgtccaagacaataagtgttccatatccgtgtttacttaaggtgacgtcaatatttgtgtgacagtgcaatgtaataaaaatatgttaactgttcactggtttttattgctttttgggcggggactcaggtatataagtagaagcagacctgtgtggttagctcataggagctggctttcatccatggaggtttgggccattttggaagaccttaggaagactaggcaactgttagagaacgcttcggacggagtctccggtttttggagattctggttcgctagtgaattagctagggtagtttttaggataaaacaggactataaacaagaatttgaaaagttgttggtagattgcccaggactttttgaagctcttaatttgggccatcaggttcactttaaagaaaaagttttatcagttttagacttttcaaccccaggtagaactgctgctgctgtggcttttcttacttttatattagataaatggatcccgcagactcatttcagcaggggatacgttttggatttcatagccacagcattgtggagaacatggaaggttcgcaagatgaggacaatcttaggttactggccagtgcagcctttgggtgtagcgggaatcctgaggcatccaccggtcatgccagcggttctggaggaggaacagcaagaggacaacccgagagccggcctggaccctccagtggaggaggcggagtagctgacttgtctcctgaactgcaacgggtgcttactggatctacgtccactggacgggataggggcgttaagagggagagggcatctagtggtactgatgctagatctgagttggctttaagtttaatgagtcgcagacgtcctgaaaccatttggtggcatgaggttcagaaagagggaagggatgaagtttctgtattgcaggagaaatattcactggaacaggtgaaaacatgttggttggagcctgaggatgattgggaggtggccattaaaaattatgccaagatagctttgaggcctgataaacagtataagattactagacggattaatatccggaatgcttgttacatatctggaaatggggctgaggtggtaatagatactcaagacaaggcagttattagatgctgcatgatggatatgtggcctggggtagtcggtatggaagcagtaacttttgtaaatgttaagtttaggggagatggttataatggaatagtgtttatggccaataccaaacttatattgcatggttgtagcttttttggtttcaacaatacctgtgtagatgcctggggacaggttagtgtacggggatgtagtttctatgcgtgttggattgccacagctggcagaaccaagagtcaattgtctctgaagaaatgcatatttcaaagatgtaacctgggcattctgaatgaaggcgaagcaagggtccgccactgcgcttctacagatactggatgttttattttgattaagggaaatgccagcgtaaagcataacatgatttgcggtgcttccgatgagaggccttatcaaatgctcacttgtgctggtgggcattgtaatatgctggctactgtgcatattgtttcccatcaacgcaaaaaatggcctgtttttgatcacaatgtgatgacgaagtgtaccatgcatgcaggtgggcgtagaggaatgtttatgccttaccagtgtaacatgaatcatgtgaaagtgttgttggaaccagatgccttttccagaatgagcctaacaggaatttttgacatgaacatgcaaatctggaagatcctgaggtatgatgatacgagatcgagggtacgcgcatgcgaatgcggaggcaagcatgccaggttccagccggtgtgtgtagatgtgactgaagatctcagaccggatcatttggttattgcccgcactggagcagagttcggatccagtggagaagaaactgactaaggtgagtattgggaaaactttggggtgggattttcagatggacagattgagtaaaaatttgttttttctgtcttgcagctgtcatgagtggaaacgcttcttttaaggggggagtcttcagcccttatctgacagggcgtctcccatcctgggcaggagttcgtcagaatgttatgggatctactgtggatggaagacccgtccaacccgccaattcttcaacgctgacctatgctactttaagttcttcacctttggacgcagctgcagctgccgccgccgcttctgttgccgctaacactgtgcttggaatgggttactatggaagcatcatggctaattccacttcctctaataacccttctaccctgactcaggacaagttacttgtccttttggcccagctggaggctttgacccaacgtctgggtgaactttctcagcaggtggtcgagttgcgagtacaaactgagtctgctgtcggcacggcaaagtctaaataaaaaaatcccagaatcaatgaataaataaacaagcttgttgttgatttaaaatcaagtgtttttatttcatttttcgcgcacggtatgccctagaccaccgatctctatcattgagaactcggtggattttttccaggatcctatagaggtgggattgaatgtttagatacatgggcattaggccgtctttggggtggagatagctccattgaagggattcatgctccggggtagtgttgtaaatcacccagtcataacaaggtcgcagtgcatggtgttgcacaatatcttttagaagtaggctgattgccacagataagcccttggtgtaggtgtttacaaaccggttgagctgggatgggtgcattcggggtgaaattatgtgcattttggattggatttttaagttggcaatattgccgccaagatcccgtcttgggttcatgttatgaaggaccaccaagacggtgtatccggtacatttaggaaatttatcgtgcagcttggatggaaaagcgtggaaaaatttggagacacccttgtgtcctccaagattttccatgcactcatccatgataatagcaatggggccgtgggcagcggcgcgggcaaacacgttccgtgggtctgacacatcatagttatgttcctgagttaaatcatcataagccattttaatgaatttggggcggagagtaccagattggggtatgaatgttccttcgggccccggagcatagttcccctcacagatttgcatttcccaagctttcagttccgagggtggaatcatgtccacctggggggctatgaaaaacaccgtttctggggcgggggtgattaattgtgatgatagcaaatttctgagcaattgagatttgccacatccggtggggccataaatgattccgattacgggttgcaggtggtagtttagggaacggcaactgccgtcttctcgaagcaagggggccacctcgttcatcatttcccttacatgcatattttcccgcaccaaatccattaggaggcgctctcctcctagtgatagaagttcttgtagtgaggaaaagtttttcagcggtttcagaccgtcagccatgggcattttggagagagtttgctgcaaaagttctagtctgttccacagttcagtgatgtgttctatggcatctcgatccagcagacctcctcgtttcgcgggtttggacggctcctggaatagggtatgagacgatgggcgtccagcgctgccagggttcggtccttccagggtctcagtgttcgagtcagggttgtttccgtcacagtgaaggggtgtgcgcctgcttgggcgcttgccagggtgcgcttcagactcatcctgctggtcgaaaacttctgtcgcttggcgccctgtatgtcggccaagtagcagtttaccatgagttcgtagttgagcgcctcggctgcgtggcctttggcgcggagcttacctttggaagttttcttgcataccgggcagtataggcatttcagcgcatacaacttgggcgcaaggaaaacggattctggggagtatgcatctgcgccgcaggaggcgcaaacagtttcacattccaccagccaggttaaatccggttcattggggtcaaaaacaagttttccgccatattttttgatgcgtttcttacctttggtctccatgagttcgtgtcctcgttgagtgacaaacaggctgtccgtgtccccgtagactgattttacaggcctcttctccagtggagtgcctcggtcttcttcgtacaggaactctgaccactctgatacaaaggcgcgcgtccaggccagcacaaaggaggctatgtgggaggggtagcgatcgttgtcaaccagggggtccaccttttccaaagtatgcaaacacatgtcaccctcttcaacatccaggaatgtgattggcttgtaggtgtatttcacgtgacctggggtccccgctgggggggtataaaagggggcggttctttgctcttcctcactgtcttccggatcgctgtccaggaacgtcagctgttggggtaggtattccctctcgaaggcgggcatgacctctgcactcaggttgtcagtttctaagaacgaggaggatttgatattgacagtgccggttgagatgcctttcatgaggttttcgtccatctggtcagaaaacacaatttttttattgtcaagtttggtggcaaatgatccatacagggcgttggataaaagtttggcaatggatcgcatggtttggttcttttccttgtccgcgcgctctttggcggcgatgttgagttggacatactcgcgtgccaggcacttccattcggggaagatagttgttaattcatctggcacgattctcacttgccaccctcgattatgcaaggtaattaaatccacactggtggccacctcgcctcgaaggggttcattggtccaacagagcctacctcctttcctagaacagaaagggggaagtgggtctagcataagttcatcgggagggtctgcatccatggtaaagattcccggaagtaaatccttatcaaaatagctgatgggagtggggtcatctaaggccatttgccattctcgagctgccagtgcgcgctcatatgggttaaggggactgccccatggcatgggatgggtgagtgcagaggcatacatgccacagatgtcatagacgtagatgggatcctcaaagatgcctatgtaggttggatagcatcgcccccctctgatacttgctcgcacatagtcatatagttcatgtgatggcgctagcagccccggacccaagttggtgcgattgggtttttctgttctgtagacgatctggcgaaagatggcgtgagaattggaagagatggtgggtctttgaaaaatgttgaaatgggcatgaggtagacctacagagtctctgacaaagtgggcataagattcttgaagcttggttaccagttcggcggtgacaagtacgtctagggcgcagtagtcaagtgtttcttgaatgatgtcataacctggttggtttttcttttcccacagttcgcggttgagaaggtattcttcgcgatccttccagtactcttctagcggaaacccgtctttgtctgcacggtaagatcctagcatgtagaactgattaactgccttgtaagggcagcagcccttctctacgggtagagagtatgcttgagcagcttttcgtagcgaagcgtgagtaagggcaaaggtgtctctgaccatgactttgaggaattggtatttgaagtcgatgtcgtcacaggctccctgttcccagagttggaagtctacccgtttcttgtaggcggggttgggcaaagcgaaagtaacatcattgaagagaatcttgccggccctgggcatgaaattgcgagtgatgcgaaaaggctgtggtacttccgctcggttattgataacctgggcagctaggacgatctcgtcgaaaccgttgatgttgtgtcctacgatgtataattctatgaaacgcggcgtgcctctgacgtgaggtagcttactgagctcatcaaaggttaggtctgtggggtcagataaggcgtagtgttcgagagcccattcgtgcaggtgaggattcgctttaaggaaggaggaccagaggtccactgccagtgctgtttgtaactggtcccggtactgacgaaaatgccgtccgactgccattttttctggggtgacgcaatagaaggtttgggggtcctgccgccagcgatcccacttgagttttatggcgaggtcataggcgatgttgacgagccgctggtctccagagagtttcatgaccagcatgaaggggattagctgcttgccaaaggaccccatccaggtgtaggtttccacatcgtaggtgagaaagagcctttctgtgcgaggatgagagccaatcgggaagaactggatctcctgccaccagttggaggaatggctgttgatgtgatggaagtagaactccctgcgacgcgccgagcattcatgcttgtgcttgtacagacggccgcagtagtcgcagcgttgcacgggttgtatctcgtgaatgagttgtacctggcttcccttgacgagaaatttcagtgggaagccgaggcctggcgattgtatctcgtgctttactatgttgtctgcatcggcctgttcatcttctgtctcgatggtggtcatgctgacgagccctcgcgggaggcaagtccagacctcggcgcggcaggggcggagctcgaggacgagagcgcgcaggctggagctgtccagggtcctgagacgctgcggactcaggttagtaggcagtgtcaggagattaacttgcatgatcttttggagggcgtgcgggaggttcagatagtacttgatctcaacgggtccgttggtggagatgtcgatggcttgcagggttccgtgtcccttgggcgctaccaccgtgcccttgtttttcattttggacggcggtggctctgttgcttcttgcatgtttagaagcggtgtcgagggcgcgcaccgggcggcaggggcggctcgggacccggcggcatggctggcagtggtacgtcggcgccgcgcgcgggtaggttctggtactgcgccctgagaagactcgcatgcgcgacgacgcggcggttgacatcctggatctgacgcctctgggtgaaagctaccggccccgtgagcttgaacctgaaagagagttcaacagaatcaatctcggtatcgttgacggcggcttgcctaaggatttcttgcacgtcaccagagttgtcctggtaggcgatctccgccatgaactgctcgatctcttcctcttgaagatctccgcggcccgctctctcgacggtggccgcgaggtcgttggagatgcgcccaatgagttgagagaatgcattcatgcccgcctcgttccagacgcggctgtagaccacggcccccacgggatctctcgcgcgcatgaccacctgggcgaggttgagctccacgtggcgggtgaagaccgcatagttgcataggcgctggaaaaggtagttgagtgtggtggcgatgtgctcggtgacgaagaaatacatgatccatcgtctcagcggcatctcgctgacatcgcccagagcttccaagcgctccatggcctcgtagaagtccacggcaaaattaaaaaactgggagtttcgcgcggacacggtcaactcctcttccagaagacggataagttcggcgatggtggtgcgcacctcgcgctcgaaagcccctgggatttcttcctcaatctcttcttcttccactaacatctcttcctcttcaggtggggctgcaggaggagggggaacgcggcgacgccggcggcgcacgggcagacggtcgatgaatctttcaatgacctctccgcggcggcggcgcatggtttcagtgacggcgcggccgttctcgcgcggtcgcagagtaaaaacaccgccgcgcatctccttaaagtggtgactgggaggttctccgtttgggagggagagggcgctgattatacattttattaattggcccgtagggactgcacgcagagatctgatcgtgtcaagatccacgggatctgaaaacctttcgacgaaagcgtctaaccagtcacagtcacaaggtaggctgagtacggcttcttgtgggcgggggtggttatgtgttcggtctgggtcttctgtttcttcttcatctcgggaaggtgagacgatgctgctggtgatgaaattaaagtaggcagttctaagacggcggatggtggcgaggagcaccaggtctttgggtccggcttgctggatacgcaggcgattggccattccccaagcattatcctgacatctagcaagatctttgtagtagtcttgcatgagccgttctacgggcacttcttcctcacccgttctgccatgcatacgtgtgagtccaaatccgcgcattggttgtaccagtgccaagtcagctacgactctttcggcgaggatggcttgctgtacttgggtaagggtggcttgaaagtcatcaaaatccacaaagcggtggtaagctcctgtattaatggtgtaagcacagttggccatgactgaccagttaactgtctggtgaccagggcgcacgagctcggtgtatttaaggcgcgaataggcgcgggtgtcaaagatgtaatcgttgcaggtgcgcaccagatactggtaccctataagaaaatgcggcggtggttggcggtagagaggccatcgttctgtagctggagcgccaggggcgaggtcttccaacataaggcggtgatagccgtagatgtacctggacatccaggtgattcctgcggcggtagtagaagcccgaggaaactcgcgtacgcggttccaaatgttgcgtagcggcatgaagtagttcattgtaggcacggtttgaccagtgaggcgcgcgcagtcattgatgctctatagacacggagaaaatgaaagcgttcagcgactcgactccgtagcctggaggaacgtgaacgggttgggtcgcggtgtaccccggttcgagacttgtactcgagccggccggagccgcggctaacgtggtattggcactcccgtctcgacccagcctacaaaaatccaggatacggaatcgagtcgttttgctggtttccgaatggcagggaagtgagtcctattttttttttttgccgctcagatgcatcccgtgctgcgacagatgcgcccccaacaacagcccccctcgcagcagcagcagcagcaatcacaaaaggctgtccctgcaactactgcaactgccgccgtgagcggtgcgggacagcccgcctatgatctggacttggaagagggcgaaggactggcacgtctaggtgcgccttcacccgagcggcatccgcgagttcaactgaaaaaagattctcgcgaggcgtatgtgccccaacagaacctatttagagacagaagcggcgaggagccggaggagatgcgagcttcccgctttaacgcgggtcgtgagctgcgtcacggtttggaccgaagacgagtgttgcgggacgaggatttcgaagttgatgaaatgacagggatcagtcctgccagggcacacgtggctgcagccaaccttgtatcggcttacgagcagacagtaaaggaagagcgtaacttccaaaagtcttttaataatcatgtgcgaaccctgattgcccgcgaagaagttacccttggtttgatgcatttgtgggatttgatggaagctatcattcagaaccctactagcaaacctctgaccgcccagctgtttctggtggtgcaacacagcagagacaatgaggctttcagagaggcgctgctgaacatcaccgaacccgaggggagatggttgtatgatcttatcaacattctacagagtatcatagtgcaggagcggagcctgggcctggccgagaaggtggctgccatcaattactcggttttgagcttgggaaaatattacgctcgcaaaatctacaagactccatacgttcccatagacaaggaggtgaagatagatgggttctacatgcgcatgacgctcaaggtcttgaccctgagcgatgatcttggggtgtatcgcaatgacagaatgcatcgcgcggttagcgccagcaggaggcgcgagttaagcgacagggaactgatgcacagtttgcaaagagctctgactggagctggaaccgagggtgagaattacttcgacatgggagctgacttgcagtggcagcctagtcgcagggctctgagcgccgcgacggcaggatgtgagcttccttacatagaagaggcggatgaaggcgaggaggaagagggcgagtacttggaagactgatggcacaacccgtgttttttgctagatggaacagcaagcaccggatcccgcaatgcgggcggcgctgcagagccagccgtccggcattaactcctcggacgattggacccaggccatgcaacgtatcatggcgttgacgactcgcaaccccgaagcctttagacagcaaccccaggccaaccgtctatcggccatcatggaagctgtagtgccttcccgctctaatcccactcatgagaaggtcctggccatcgtgaacgcgttggtggagaacaaagctattcgtccagatgaggccggactggtatacaacgctctcttagaacgcgtggctcgctacaacagtagcaatgtgcaaaccaatttggaccgtatgataacagatgtacgcgaagccgtgtctcagcgcgaaaggttccagcgtgatgccaacctgggttcgctggtggcgttaaatgctttcttgagtactcagcctgctaatgtgccgcgtggtcaacaggattatactaactttttaagtgctttgagactgatggtatcagaagtacctcagagcgaagtgtatcagtccggtcctgattacttctttcagactagcagacagggcttgcagacggtaaatctgagccaagcttttaaaaaccttaaaggtttgtggggagtgcatgccccggtaggagaaagagcaaccgtgtctagcttgttaactccgaactcccgcctattattactgttggtagctcctttcaccgacagcggtagcatcgaccgtaattcctatttgggttacctactaaacctgtatcgcgaagccatagggcaaagtcaggtggacgagcagacctatcaagaaattacccaagtcagtcgcgctttgggacaggaagacactggcagtttggaagccactctgaacttcttgcttaccaatcggtctcaaaagatccctcctcaatatgctcttactgcggaggaggagaggatccttagatatgtgcagcagagcgtgggattgtttctgatgcaagagggggcaactccgactgcagcactggacatgacagcgcgaaatatggagcccagcatgtatgccagtaaccgacctttcattaacaaactgctggactacttgcacagagctgccgctatgaactctgattatttcaccaatgccatcttaaacccgcactggctgcccccacctggtttctacacgggcgaatatgacatgcccgaccctaatgacggatttctgtgggacgacgtggacagcgatgttttttcacctctttctgatcatcgcacgtggaaaaaggaaggcggcgatagaatgcattcttctgcatcgctgtccggggtcatgggtgctaccgcggctgagcccgagtctgcaagtccttttcctagtctacccttttctctacacagtgtacgtagcagcgaagtgggtagaataagtcgcccgagtttaatgggcgaagaggagtatctaaacgattccttgctcagaccggcaagagaaaaaaatttcccaaacaatggaatagaaagtttggtggataaaatgagtagatggaagacttatgctcaggatcacagagacgagcctgggatcatggggattacaagtagagcgagccgtagacgccagcgccatgacagacagaggggtcttgtgtgggacgatgaggattcggccgatgatagcagcgtgctggacttgggtgggagaggaaggggcaacccgtttgctcatttgcgccctcgcttgggtggtatgttgtaaaaaaaaataaaaaaaaaactcaccaaggccatggcgacgagcgtacgttcgttcttctttattatctgtgtctagtataatgaggcgagtcgtgctaggcggagcggtggtgtatccggagggtcctcctccttcgtacgagagcgtgatgcagcagcagcaggcgacggcggtgatgcaatccccactggaggctccctttgtgcctccgcgatacctggcacctacggagggcagaaacagcattcgttattcggaactggcacctcagtacgataccaccaggttgtatctggtggacaacaagtcggcggacattgcttctctgaactatcagaatgaccacagcaacttcttgaccacggtggtgcaaaacaatgactttacccctacggaagccagcacccagaccattaactttgatgaacgatcgcggtggggcggtcagctaaagaccatcatgcatactaacatgccaaacgtgaacgagtatatgtttagtaacaagttcaaagcgcgtgtgatggtgtccagaaaacctcccgacggtgctgcagttggggatacttatgatcacaagcaggatattttgaaatatgagtggttcgagtttactttgccagaaggcaacttttcagttactatgactattgatttgatgaacaatgccatcatagataattacttgaaagtgggtagacagaatggagtgcttgaaagtgacattggtgttaagttcgacaccaggaacttcaagctgggatgggatcccgaaaccaagttgatcatgcctggagtgtatacgtatgaagccttccatcctgacattgtcttactgcctggctgcggagtggattttaccgagagtcgtttgagcaaccttcttggtatcagaaaaaaacagccatttcaagagggttttaagattttgtatgaagatttagaaggtggtaatattccggccctcttggatgtagatgcctatgagaacagtaagaaagaacaaaaagccaaaatagaagctgctacagctgctgcagaagctaaggcaaacatagttgccagcgactctacaagggttgctaacgctggagaggtcagaggagacaattttgcgccaacacctgttccgactgcagaatcattattggccgatgtgtctgaaggaacggacgtgaaactcactattcaacctgtagaaaaagatagtaagaatagaagctataatgtgttggaagacaaaatcaacacagcctatcgcagttggtatctttcgtacaattatggcgatcccgaaaaaggagtgcgttcctggacattgctcaccacctcagatgtcacctgcggagcagagcaggtctactggtcgcttccagacatgatgaaggatcctgtcactttccgctccactagacaagtcagtaactaccctgtggtgggtgcagagcttatgcccgtcttctcaaagagcttctacaacgaacaagctgtgtactcccagcagctccgccagtccacctcgcttacgcacgtcttcaaccgctttcctgagaaccagattttaatccgtccgccggcgcccaccattaccaccgtcagtgaaaacgttcctgctctcacagatcacgggaccctgccgttgcgcagcagtatccggggagtccaacgtgtgaccgttactgacgccagacgccgcacctgtccctacgtgtacaaggcactgggcatagtcgcaccgcgcgtcctttcaagccgcactttctaaaaaaaaaaaaaatgtccattcttatctcgcccagtaataacaccggttggggtctgcgcgctccaagcaagatgtacggaggcgcacgcaaacgttctacccaacatcctgtccgtgttcgcggacattttcgcgctccatggggcgccctcaagggccgcactcgcgttcgaaccaccgtcgatgatgtaatcgatcaggtggttgccgacgcccgtaattatactcctactgcgcctacatctactgtggatgcagttattgacagtgtagtggctgacgctcgcaactatgctcgacgtaagagccggcgaaggcgcattgccagacgccaccgagctaccactgccatgcgagccgcaagagctctgctacgaagagctagacgcgtggggcgaagagccatgcttagggcggccagacgtgcagcttcgggcgccagcgccggcaggtcccgcaggcaagcagccgctgtcgcagcggcgactattgccgacatggcccaatcgcgaagaggcaatgtatactgggtgcgtgacgctgccaccggtcaacgtgtacccgtgcgcacccgtccccctcgcacttagaagatactgagcagtctccgatgttgtgtcccagcggcgaggatgtccaagcgcaaatacaaggaagaaatgctgcaggttatcgcacctgaagtctacggccaaccgttgaaggatgaaaaaaaaccccgcaaaatcaagcgggttaaaaaggacaaaaaagaagaggaagatggcgatgatgggctggcggagtttgtgcgcgagtttgccccacggcgacgcgtgcaatggcgtgggcgcaaagttcgacatgtgttgagacctggaacttcggtggtctttacacccggcgagcgttcaagcgctacttttaagcgttcctatgatgaggtgtacggggatgatgatattcttgagcaggcggctgaccgattaggcgagtttgcttatggcaagcgtagtagaataacttccaaggatgagacagtgtcgatacccttggatcatggaaatcccacccctagtcttaaaccggtcactttgcagcaagtgttacccgtaactccgcgaacaggtgttaaacgcgaaggtgaagatttgtatcccactatgcaactgatggtacccaaacgccagaagttggaggacgttttggagaaagtaaaagtggatccagatattcaacctgaggttaaagtgagacccattaagcaggtagcgcctggtctgggggtacaaactgtagacattaagattcccactgaaagtatggaagtgcaaactgaacccgcaaagcctactgccacctccactgaagtgcaaacggatccatggatgcccatgcctattacaactgacgccgccggtcccactcgaagatcccgacgaaagtacggtccagcaagtctgttgatgcccaattatgttgtacacccatctattattcctactcctggttaccgaggcactcgctactatcgcagccgaaacagtacctcccgccgtcgccgcaagacacctgcaaatcgcagtcgtcgccgtagacgcacaagcaaaccgactcccggcgccctggtgcggcaagtgtaccgcaatggtagtgcggaacctttgacactgccgcgtgcgcgttaccatccgagtatcatcacttaatcaatgttgccgctgcctccttgcagatatggccctcacttgtcgccttcgcgttcccatcactggttaccgaggaagaaactcgcgccgtagaagagggatgttgggacgcggaatgcgacgctacaggcgacggcgtgctatccgcaagcaattgcggggtggttttttaccagccttaattccaattatcgctgctgcaattggcgcgataccaggcatagcttccgtggcggttcaggcctcgcaacgacattgacattggaaaaaaacgtataaataaaaaaaaaaaaatacaatggactctgacactcctggtcctgtgactatgttttcttagagatggaagacatcaatttttcatccttggctccgcgacacggcacgaagccgtacatgggcacctggagcgacatcggcacgagccaactgaacgggggcgccttcaattggagcagtatctggagcgggcttaaaaattttggctcaaccataaaaacatacgggaacaaagcttggaacagcagtacaggacaggcgcttagaaataaacttaaagaccagaacttccaacaaaaagtagtcgatgggatagcttccggcatcaatggagtggtagatttggctaaccaggctgtgcagaaaaagataaacagtcgtttggacccgccgccagcaaccccaggtgaaatgcaagtggaggaagaaattcctccgccagaaaaacgaggcgacaagcgtccgcgtcccgatttggaagagacgctggtgacgcgcgtagatgaaccgccttcttatgaggaagcaacgaagcttggaatgcccaccactagaccgatagccccaatggccaccggggtgatgaaaccttctcagttgcatcgacccgtcaccttggatttgccccctccccctgctgctactgctgtacccgcttctaagcctgtcgctgccccgaaaccagtcgccgtagccaggtcacgtcccgggggcgctcctcgtccaaatgcgcactggcaaaatactctgaacagcatcgtgggtctaggcgtgcaaagtgtaaaacgccgtcgctgcttttaattaaatatggagtagcgcttaacttgcctatctgtgtatatgtgtcattacacgccgtcacagcagcagaggaaaaaaggaagaggtcgtgcgtcgacgctgagttactttcaagatggccaccccatcgatgctgccccaatgggcatacatgcacatcgccggacaggatgcttcggagtacctgagtccgggtctggtgcagttcgcccgcgccacagacacctacttcaatctgggaaataagtttagaaatcccaccgtagcgccgacccacgatgtgaccaccgaccgtagccagcggctcatgttgcgcttcgtgcccgttgaccgggaggacaatacatactcttacaaagtgcggtacaccctggccgtgggcgacaacagagtgctggatatggccagcacgttctttgacattaggggtgtgttggacagaggtcccagtttcaaaccctattctggtacggcttacaactccctggctcctaaaggcgctccaaatacatctcagtggattgcagaaggtgtaaaaaatacaactggtgaggaacacgtaacagaagaggaaaccaatactactacttacacttttggcaatgctcctgtaaaagctgaagctgaaattacaaaagaaggactcccagtaggtttggaagtttcagatgaagaaagtaaaccgatttatgctgataaaacatatcagccagaacctcagctgggagatgaaacttggactgaccttgatggaaaaaccgaaaagtatggaggcagggctctcaaacccgatactaagatgaaaccatgctacgggtcctttgccaaacctactaatgtgaaaggcggtcaggcaaaacaaaaaacaacggagcagccaaatcagaaagtcgaatatgatatcgacatggagttttttgatgcggcatcgcagaaaacaaacttaagtcctaaaattgtcatgtatgcagaaaatgtaaatttggaaactccagacactcatgtagtgtacaaacctggaacagaagacacaagttccgaagctaatttgggacaacaatctatgcccaacagacccaactacattggcttcagagataactttattggacttatgtactataacagtactggtaacatgggggtgctggctggtcaagcgtctcagttaaatgcagtggttgacttgcaggacagaaacacagaactttcttaccaactcttgcttgactctctgggcgacagaaccagatactttagcatgtggaatcaggctgtggacagttatgatcctgatgtacgtgttattgaaaatcatggtgtggaagatgaacttcccaactactgttttccactggacggcataggtgttccaacaaccagttacaaatcaatagttccaaatggagacaatgcgcctaattggaaggaacctgaagtaaatggaacaagtgagatcggacagggtaatttgtttgccatggaaattaaccttcaagccaatctatggcgaagtttcctttattccaatgtggctctatatctcccagactcgtacaaatacaccccgtccaatgtcactcttccagaaaacaaaaacacctacgactacatgaacgggcgggtggtgccgccatctctagtagacacctatgtgaacattggtgccaggtggtctctggatgccatggacaatgtcaacccattcaaccaccaccgtaacgctggcttgcgttaccgatccatgcttctgggtaacggacgttatgtgcctttccacatacaagtgcctcaaaaattcttcgctgttaaaaacctgctgcttctcccaggctcctacacttatgagtggaactttaggaaggatgtgaacatggttctacagagttccctcggtaacgacctgcgggtagatggcgccagcatcagtttcacgagcatcaacctctatgctacttttttccccatggctcacaacaccgcttccacccttgaagccatgctgcggaatgacaccaatgatcagtcattcaacgactacctatctgcagctaacatgctctaccccattcctgccaatgcaaccaatattcccatttccattccttctcgcaactgggcggctttcagaggctggtcatttaccagactgaaaaccaaagaaactccctctttggggtctggatttgacccctactttgtctattctggttctattccctacctggatggtaccttctacctgaaccacacttttaagaaggtttccatcatgtttgactcttcagtgagctggcctggaaatgacaggttactatctcctaacgaatttgaaataaagcgcactgtggatggcgaaggctacaacgtagcccaatgcaacatgaccaaagactggttcttggtacagatgctcgccaactacaacatcggctatcagggcttctacattccagaaggatacaaagatcgcatgtattcatttttcagaaacttccagcccatgagcaggcaggtggttgatgaggtcaattacaaagacttcaaggccgtcgccataccctaccaacacaacaactctggctttgtgggttacatggctccgaccatgcgccaaggtcaaccctatcccgctaactatccctatccactcattggaacaactgccgtaaatagtgttacgcagaaaaagttcttgtgtgacagaaccatgtggcgcataccgttctcgagcaacttcatgtctatgggggcccttacagacttgggacagaatatgctctatgccaactcagctcatgctctggacatgacctttgaggtggatcccatggatgagcccaccctgctttatcttctcttcgaagttttcgacgtggtcagagtgcatcagccacaccgcggcatcatcgaggcagtctacctgcgtacaccgttctcggccggtaacgctaccacgtaagaagcttcttgcttcttgcaaatagcagctgcaaccatggcctgcggatcccaaaacggctccagcgagcaagagctcagagccattgtccaagacctgggttgcggaccctattttttgggaacctacgataagcgcttcccggggttcatggcccccgataagctcgcctgtgccattgtaaatacggccggacgtgagacggggggagagcactggttggctttcggttggaacccacgttctaacacctgctacctttttgatccttttggattctcggatgatcgtctcaaacagatttaccagtttgaatatgagggtctcctgcgccgcagcgctcttgctaccaaggaccgctgtattacgctggaaaaatctacccagaccgtgcagggtccccgttctgccgcctgcggacttttctgctgcatgttccttcacgcctttgtgcactggcctgaccgtcccatggacggaaaccccaccatgaaattgctaactggagtgccaaacaacatgcttcattctcctaaagtccagcccaccctgtgtgacaatcaaaaagcactctaccattttcttaatacccattcgccttattttcgctcccatcgtacacacatcgaaagggccactgcgttcgaccgtatggatgttcaataatgactcatgtaaacaacgtgttcaataaacatcactttatttttttacatgtatcaaggctctgcattacttatttatttacaagtcgaatgggttctgacgagaatcagaatgacccgcaggcagtgatacgttgcggaactgatacttgggttgccacttgaattcgggaatcaccaacttgggaaccggtatatcgggcaggatgtcactccacagctttctggtcagctgcaaagctccaagcaggtcaggagccgaaatcttgaaatcacaattaggaccagtgctttgagcgcgagagttgcggtacaccggattgcagcactgaaacaccatcagcgacggatgtctcacgcttgccagcacggtgggatctgcaatcatgcccacatccagatcttcagcattggcaatgctgaacggggtcatcttgcaggtctgcctacccatggcgggcacccaattaggcttgtggttgcaatcgcagtgcagggggatcagtatcatcttggcctgatcctgtctgattcctggatacacggctctcatgaaagcatcatattgcttgaaagcctgctgggctttactaccctcggtataaaacatcccgcaggacctgctcgaaaactggttagctgcacagccggcatcattcacacagcagcgggcgtcattgttagctatttgcaccacacttctgccccagcggttttgggtgattttggttcgctcgggattctcctttaaggctcgttgtccgttctcgctggccacatccatctcgataatctgctccttctgaatcataatattgccatgcaggcacttcagcttgccctcataatcattgcagccatgaggccacaacgcacagcctgtacattcccaattatggtgggcgatctgagaaaaagaatgtatcattccctgcagaaatcttcccatcatcgtgctcagtgtcttgtgactagtgaaagttaactggatgcctcggtgctcctcgtttacgtactggtgacagatgcgcttgtattgttcgtgttgctcaggcattagtttaaaagaggttctaagttcgttatccagcctgtacttctccatcagcagacacatcacttccatgcctttctcccaagcagacaccaggggcaagctaatcggattcttaacagtgcaggcagcagctcctttagccagagggtcatctttagcgatcttctcaatgcttcttttgccatccttctcaacgatgcgcacgggcgggtagctgaaacccactgctacaagttgcgcctcttctctttcttcttcgctgtcttgactgatgtcttgcatggggatatgtttggtcttccttggcttctttttggggggtatcggaggaggaggactgtcgctccgttccggagacagggaggattgtgacgtttcgctcaccattaccaactgactgtcggtagaagaacctgaccccacacggcgacaggtgtttctcttcgggggcagaggtggaggcgattgcgaagggctgcggtccgacctggaaggcggatgactggcagaaccccttccgcgttcgggggtgtgctccctgtggcggtcgcttaactgatttccttcgcggctggccattgtgttctcctaggcagagaaacaacagacatggaaactcagccattgctgtcaacatcgccacgagtgccatcacatctcgtcctcagcgacgaggaaaaggagcagagcttaagcattccaccgcccagtcctgccaccacctctaccctagaagataaggaggtcgacgcatctcatgacatgcagaataaaaaagcgaaagagtctgagacagacatcgagcaagacccgggctatgtgacaccggtggaacacgaggaagagttgaaacgctttctagagagagaggatgaaaactgcccaaaacaacgagcagataactatcaccaagatgctggaaatagggatcagaacaccgactacctcatagggcttgacggggaagacgcgctccttaaacatctagcaagacagtcgctcatagtcaaggatgcattattggacagaactgaagtgcccatcagtgtggaagagctcagccgcgcctacgagcttaacctcttttcacctcgtactccccccaaacgtcagccaaacggcacctgcgagccaaatcctcgcttaaacttttatccagcttttgctgtgccagaagtactggctacctatcacatcttttttaaaaatcaaaaaattccagtctcctgccgcgctaatcgcacccgcgccgatgccctactcaatctgggacctggttcacgcttacctgatatagcttccttggaagaggttccaaagatcttcgagggtctgggcaataatgagactcgggccgcaaatgctctgcaaaagggagaaaatggcatggatgagcatcacagcgttctggtggaattggaaggcgataatgccagactcgcagtactcaagcgaagcatcgaggtcacacacttcgcatatcccgctgtcaacctgccccctaaagtcatgacggcggtcatggaccagttactcattaagcgcgcaagtcccctttcagaagacatgcatgacccagatgcctgtgatgagggtaaaccagtggtcagtgatgagcagctaacccgatggctgggcaccgactctcccagggatttggaagagcgtcgcaagcttatgatggccgtggtgctggttaccgtagaactagagtgtctccgacgtttctttaccgattcagaaaccttgcgcaaactcgaagagaatctgcactacacttttagacacggctttgtgcggcaggcatgcaagatatctaacgtggaactcaccaacctggtttcctacatgggtattctgcatgagaatcgcctaggacaaagcgtgctgcacagcaccctgaagggggaagcccgccgtgattacatccgcgattgtgtctatctgtacctgtgccacacgtggcaaaccggcatgggtgtatggcagcaatgtttagaagaacagaacttgaaagagcttgacaagctcttacagaaatctcttaaggttctgtggacagggttcgacgagcgcaccgtcgcttccgacctggcagacctcatcttcccagagcgtctcagggttactttgcgaaacggattgcctgactttatgagccagagcatgcttaacaattttcgctctttcatcctggaacgctccggtatcctgcccgccacctgctgcgcactgccctccgactttgtgcctctcacctaccgcgagtgccccccgccgctatggagtcactgctacctgttccgtctggccaactatctctcctaccactcggatgtgatcgaggatgtgagcggagacggcttgctggagtgtcactgccgctgcaatctgtgcacgccccaccggtccctagcttgcaacccccagttgatgagcgaaacccagataataggcacctttgaattgcaaggccccagcagccaaggcgatgggtcttctcctgggcaaagtttaaaactgaccccgggactgtggacctccgcctacttgcgcaagtttgctccggaagattaccacccctatgaaatcaagttctatgaggaccaatcacagcctccaaaggccgaactttcggcctgcgtcatcacccagggggcaattctggcccaattgcaagccatccaaaaatcccgccaagaatttctactgaaaaagggtaagggggtctaccttgacccccagaccggcgaggaactcaacacaaggttccctcaggatgtcccaacgacgagaaaacaagaagttgaaggtgcagccgccgcccccagaagatatggaggaagattgggacagtcaggcagaggaggcggaggaggacagtctggaggacagtctggaggaagacagtttggaggaggaaaacgaggaggcagaggaggtggaagaagtaaccgccgacaaacagttatcctcggctgcggagacaagcaacagcgctaccatctccgctccgagtcgaggaacccggcggcgtcccagcagtagatgggacgagaccggacgcttcccgaacccaaccagcgcttccaagaccggtaagaaggatcggcagggatacaagtcctggcgggggcataagaatgccatcatctcctgcttgcatgagtgcgggggcaacatatccttcacgcggcgctacttgctattccaccatggggtgaactttccgcgcaatgttttgcattactaccgtcacctccacagcccctactatagccagcaaatcccggcagtctcgacagataaagacagcggcggcgacctccaacagaaaaccagcagcggcagttagaaaatacacaacaagtgcagcaacaggaggattaaagattacagccaacgagccagcgcaaacccgagagttaagaaatcggatctttccaaccctgtatgccatcttccagcagagtcggggtcaagagcaggaactgaaaataaaaaaccgatctctgcgttcgctcaccagaagttgtttgtatcacaagagcgaagatcaacttcagcgcactctcgaggacgccgaggctctcttcaacaagtactgcgcgctgactcttaaagagtaggcagcgaccgcgcttattcaaaaaaggcgggaattacatcatcctcgacatgagtaaagaaattcccacgccttacatgtggagttatcaaccccaaatgggattggcggcaggcgcctcccaggactactccacccgcatgaattggctcagcgccgggccttctatgatttctcgagttaatgatatacgcgcctaccgaaaccaaatacttttggaacagtcagctcttaccaccacgccccgccaacaccttaatcccagaaattggcccgccgccctagtgtaccaggaaagtcccgctcccaccactgtattacttcctcgagacgcccaggccgaagtccaaatgactaatgcaggtgcgcagttagctggcggctccaccctatgtcgtcacaggcctcggcataatataaaacgcctgatgatcagaggccgaggtatccagctcaacgacgagtcggtgagctctccgcttggtctacgaccagacggaatctttcagattgccggctgcgggagatcttccttcacccctcgtcaggctgttctgactttggaaagttcgtcttcgcaaccccgctcgggcggaatcgggaccgttcaatttgtggaggagtttactccctctgtctacttcaaccccttctccggatctcctgggcattacccggacgagttcataccgaacttcgacgcgattagcgagtcagtggacggctacgattgatgtctggtgacgcggctgagctatctcggctgcgacatctagaccactgccgccgctttcgctgctttgcccgggaactcattgagttcatctacttcgaactccccaaggatcaccctcaaggtccggcccacggagtgcggatttctatcgaaggcaaaatagactctcgcctgcaacgaattttctcccagcggcccgtgctgatcgagcgagaccagggaaacaccacggtttccatctactgcatttgtaatcaccccggattgcatgaaagcctttgctgtcttatgtgtactgagtttaataaaaactgaattaagactctcctacggactgccgcttcttcaacccggattttacaaccagaagaacgaaacttttcctgtcgtccaggactctgttaacttcacctttcctactcacaaactagaagctcaacgactacaccgcttttccagaagcattttccctactaatactactttcaaaaccggaggtgagctccaaggtcttcctacagaaaacccttgggtggaagcgggccttgtagtgctaggaattcttgcgggtgggcttgtgattattctttgctacctatacacaccttgcttcactttcttagtggtgttgtggtattggtttaaaaaatggggcccatactagtcttgcttgttttactttcgcttttggaaccgggttctgccaattacgatccatgtctagacttcgacccagaaaactgcacacttacttttgcacccgacacaagccgcatctgtggagttcatcgcctctcttacgaacttggcccccaacgacaaaaatttacctgcatggtgggaatcaaccccatagttatcacccagcaaagtggagatactaagggttgcattcactgctcctgcgattccatcgagtgcacctacaccctgctgaagaccctatgcggcctaagagacctgctaccaatgaattaaaaaatgattaataaaaaatcacttactgcggccgctatggccggcctgaaatcagcaataaggtctctgttgaaattttctcccagcagcacctcacttccctcttcccaactctggtattctaaaccccgttcagcggcatactttctccatactttaaaggggatgtcaaattttagctcctctcctgtacccacaatcttcatgtctttcttcccagatgaccaagagagtccggctcagtgactccttcaaccctgtctacccctatgaagatgaaagcacctcccaacacccctttataaacccagggtttatttccccaaatggcttcacacaaagcccaaacggagttcttactttaaaatgtttaaccccactaacaaccacaggcggatctctacagctaaaagtgggagggggacttacagtggatgacaccaacggttttttgaaagaaaacataagtgccaccacaccactcgttaagactggtcactctataggtttaccactaggagccggattgggaacgaatgaaaataaactttgtatcaaattaggacaaggacttacattcaattcaaacaacatttgcattgatgacaatattaacaccttatggacaggagtcaaccccaccgaagccaactgtcaaatcatgaactccagtgaatctaatgattgcaaattaattctaacactagttaaaactggagcactagtcactgcatttgtttatgttataggagtatctaacaattttaatatgctaactacacacagaaatataaattttactgcagagctgtttttcgattctactggtaatttactaactagactctcatccctcaaaactccacttaatcataaatcaggacaaaacatggctactggtgccattactaatgctaaaggtttcatgcccagcacgactgcctatcctttcaatgataattctagagaaaaagaaaactacatttacggaacttgttactacacagctagtgatcgcactgcttttcccattgacatatctgtcatgcttaaccgaagagcaataaatgacgagacatcatattgtattcgtataacttggtcctggaacacaggagatgccccagaggtgcaaacctctgctacaaccctagtcacctccccatttaccttttactacatcagagaagacgactgacaaataaagtttgcgatcgctaccctgcaggaacttgtttatttgaaaatcaattcacaaaatccgagtagttattttgcctcccccttcccatttaacagaatacaccaatctctccccacgcacagctttaaacatttggataccattagatatagacatggttttagattccacattccaaacagtttcagagcgagccaatctggggtcagtgatagataaaaatccatcgggatagtcttttaaagcgctttcacagtccaactgctgcggatgcgactccggagtctggatcacggtcatctggaagaagaacgatgggaatcataatccgaaaacggtatcggacgattgtgtctcatcaaacccacaagcagccgctgtctgcgtcgctccgtgcgactgctgtttatgggatcagggtccacagtgtcctgaagcatgattttaatagcccttaacatcaactttctggtgcgatgcgcgcagcaacgcattctgatttcactcaaatctttgcagtaggtacaacacattattacaatattgtttaataaaccataattaaaagcgctccagccaaaactcatatctgatataatcgcccctgcatgaccatcataccaaagtttaatataaattaaatgacgttccctcaaaaacacactacccacatacatgatctcttttggcatgtgcatattaacaatctgtctgtaccatggacaacgttggttaatcatgcaacccaatataaccttccggaaccacactgccaacaccgctcccccagccatgcattgaagtgaaccctgctgattacaatgacaatgaagaacccaattctctcgaccgtgaatcacttgagaatgaaaaatatctatagtggcacaacatagacataaatgcatgcatcttctcataatttttaactcctcaggatttagaaacatatcccagggaataggaagctcttgcagaacagtaaagctggcagaacaaggaagaccacgaacacaacttacactatgcatagtcatagtatcacaatctggcaacagcgggtggtcttcagtcatagaagctcgggtttcattttcctcacaacgtggtaactgggctctggtgtaagggtgatgtctggcgcatgatgtcgagcgtgcgcgcaaccttgtcataatggagttgcttcctgacattctcgtattttgtatagcaaaacgcggccctggcagaacacactcttcttcgccttctatcctgccgcttagcgtgttccgtgtgatagttcaagtacaaccacactcttaagttggtcaaaagaatgctggcttcagttgtaatcaaaactccatcgcatctaatcgttctgaggaaatcatccaagcaatgcaactggattgtgtttcaagcaggagaggagagggaagagacggaagaaccatgttaatttttattccaaacgatctcgcagtacttcaaattgtagatcgcgcagatggcatctctcgcccccactgtgttggtgaaaaagcacagctagatcaaaagaaatgcgattttcaaggtgctcaacggtggcttccagcaaagcctccacgcgcacatccaagaacaaaagaataccaaaagaaggagcattttctaactcctcaatcatcatattacattcctgcaccattcccagataattttcagctttccagccttgaattattcgtgtcagttcttgtggtaaatccaatccacacattacaaacaggtcccggagggcgccctccaccaccattcttaaacacaccctcataatgacaaaatatcttgctcctgtgtcacctgtagcgaattgagaatggcaacatcaattgacatgcccttggctctaagttcttctttaagttctagttgtaaaaactctctcatattatcaccaaactgcttagccagaagccccccgggaacaagagcaggggacgctacagtgcagtacaagcgcagacctccccaattggctccagcaaaaacaagattggaataagcatattgggaaccgccagtaatatcatcgaagttgctggaaatataatcaggcagagtttcttgtaaaaattgaataaaagaaaaatttgccaaaaaaacattcaaaacctctgggatgcaaatgcaataggttaccgcgctgcgctccaacattgttagttttgaattagtctgcaaaaataaaaaaaaaaacaagcgtcatatcatagtagcctgacgaacagatggataaatcagtctttccatcacaagacaagccacagggtctccagctcgaccctcgtaaaacctgtcatcatgattaaacaacagcaccgaaagttcctcgcggtgaccagcatgaataattcttgatgaagcatacaatccagacatgttagcatcagttaacgagaaaaaacagccaacatagcctttgggtataattatgcttaatcgtaagtatagcaaagccacccctcgcggatacaaagtaaaaggcacaggagaataaaaaatataattatttctctgctgctgttcaggcaacgtcgcccccggtccctctaaatacacatacaaagcctcatcagccatggcttaccagacaaagtacagcgggcacacaaagcacaagctctaaagtgactctccaacctctccacaatatatatatacacaagccctaaactgacgtaatgggagtaaagtgtaaaaaatcccgccaaacccaacacacaccccgaaactgcgtcaccagggaaaagtacagtttcacttccgcaatcccaacaggcgtaacttcctctttctcacggtacgtgatatcccactaacttgcaacgtcattttcccacggtcgcaccgccccttttagccgttaaccccacagccaatcaccacacgatccacactttttaaaatcacctcatttacatattggcaccattccatctataaggtatattatatagataga

SEQ ID NO: 64 - DNA, 35208 bp, Artificial Sequence
  pNG-33 (pColoAd2.4) DNA plasmid, consisting of a bacterial origin of replication (p15A), an antibiotic resistance gene (KanR) and the EnAd genome
ggcgcgcctatctatataatataccttatagatggaatggtgccaatatgtaaatgaggtgattttaaaaagtgtggatcgtgtggtgattggctgtggggttaacggctaaaaggggcggtgcgaccgtgggaaaatgacgttttgtgggggtggagtttttttgcaagttgtcgcgggaaatgtgacgcataaaaaggcttttttctcacggaactacttagttttcccacggtatttaacaggaaatgaggtagttttgaccggatgcaagtgaaaattgttgattttcgcgcgaaaactgaatgaggaagtgtttttctgaataatgtggtatttatggcagggtggagtatttgttcagggccaggtagactttgacccattacgtggaggtttcgattaccgtgttttttacctgaatttccgcgtaccgtgtcaaagtcttctgtttttacgtaggtgtcagctgatcgctagggtatttatacctcagggtttgtgtcaagaggccactcttgagtgccagcgagaagagttttctcctctgcgccggcagtttaataataaaaaaatgagagatttgcgatttctgcctcaggaaataatctctgctgagactggaaatgaaatattggagcttgtggtgcacgccctgatgggagacgatccggagccacctgtgcagctttttgagcctcctacgcttcaggaactgtatgatttagaggtagagggatcggaggattctaatgaggaagctgtaaatggcttttttaccgattctatgcttttagctgctaatgaagggttagaattagatccgcctttggacacttttgatactccaggggtaattgtggaaagcggtacaggtgtaagaaaattacctgatttgagttccgtggactgtgatttgcactgctatgaagacgggtttcctccgagtgatgaggaggaccatgaaaaggagcagtccatgcagactgcagcgggtgagggagtgaaggctgccaatgttggttttcagttggattgcccggagcttcctggacatggctgtaagtcttgtgaatttcacaggaaaaatactggagtaaaggaactgttatgttcgctttgttatatgagaacgcactgccactttatttacagtaagtgtgtttaagttaaaatttaaaggaatatgctgtttttcacatgtatattgagtgtgagttttgtgcttcttattataggtcctgtgtctgatgctgatgaatcaccatctcctgattctactacctcacctcctgagattcaagcacctgttcctgtggacgtgcgcaagcccattcctgtgaagcttaagcctgggaaacgtccagcagtggaaaaacttgaggacttgttacagggtggggacggacctttggacttgagtacacggaaacgtccaagacaataagtgttccatatccgtgtttacttaaggtgacgtcaatatttgtgtgacagtgcaatgtaataaaaatatgttaactgttcactggtttttattgctttttgggcggggactcaggtatataagtagaagcagacctgtgtggttagctcataggagctggctttcatccatggaggtttgggccattttggaagaccttaggaagactaggcaactgttagagaacgcttcggacggagtctccggtttttggagattctggttcgctagtgaattagctagggtagtttttaggataaaacaggactataaacaagaatttgaaaagttgttggtagattgcccaggactttttgaagctcttaatttgggccatcaggttcactttaaagaaaaagttttatcagttttagacttttcaaccccaggtagaactgctgctgctgtggcttttcttacttttatattagataaatggatcccgcagactcatttcagcaggggatacgttttggatttcatagccacagcattgtggagaacatggaaggttcgcaagatgaggacaatcttaggttactggccagtgcagcctttgggtgtagcgggaatcctgaggcatccaccggtcatgccagcggttctggaggaggaacagcaagaggacaacccgagagccggcctggaccctccagtggaggaggcggagtagctgacttgtctcctgaactgcaacgggtgcttactggatctacgtccactggacgggataggggcgttaagagggagagggcatctagtggtactgatgctagatctgagttggctttaagtttaatgagtcgcagacgtcctgaaaccatttggtggcatgaggttcagaaagagggaagggatgaagtttctgtattgcaggagaaatattcactggaacaggtgaaaacatgttggttggagcctgaggatgattgggaggtggccattaaaaattatgccaagatagctttgaggcctgataaacagtataagattactagacggattaatatccggaatgcttgttacatatctggaaatggggctgaggtggtaatagatactcaagacaaggcagttattagatgctgcatgatggatatgtggcctggggtagtcggtatggaagcagtaacttttgtaaatgttaagtttaggggagatggttataatggaatagtgtttatggccaataccaaacttatattgcatggttgtagcttttttggtttcaacaatacctgtgtagatgcctggggacaggttagtgtacggggatgtagtttctatgcgtgttggattgccacagctggcagaaccaagagtcaattgtctctgaagaaatgcatatttcaaagatgtaacctgggcattctgaatgaaggcgaagcaagggtccgccactgcgcttctacagatactggatgttttattttgattaagggaaatgccagcgtaaagcataacatgatttgcggtgcttccgatgagaggccttatcaaatgctcacttgtgctggtgggcattgtaatatgctggctactgtgcatattgtttcccatcaacgcaaaaaatggcctgtttttgatcacaatgtgatgacgaagtgtaccatgcatgcaggtgggcgtagaggaatgtttatgccttaccagtgtaacatgaatcatgtgaaagtgttgttggaaccagatgccttttccagaatgagcctaacaggaatttttgacatgaacatgcaaatctggaagatcctgaggtatgatgatacgagatcgagggtacgcgcatgcgaatgcggaggcaagcatgccaggttccagccggtgtgtgtagatgtgactgaagatctcagaccggatcatttggttattgcccgcactggagcagagttcggatccagtggagaagaaactgactaaggtgagtattgggaaaactttggggtgggattttcagatggacagattgagtaaaaatttgttttttctgtcttgcagctgtcatgagtggaaacgcttcttttaaggggggagtcttcagcccttatctgacagggcgtctcccatcctgggcaggagttcgtcagaatgttatgggatctactgtggatggaagacccgtccaacccgccaattcttcaacgctgacctatgctactttaagttcttcacctttggacgcagctgcagctgccgccgccgcttctgttgccgctaacactgtgcttggaatgggttactatggaagcatcatggctaattccacttcctctaataacccttctaccctgactcaggacaagttacttgtccttttggcccagctggaggctttgacccaacgtctgggtgaactttctcagcaggtggtcgagttgcgagtacaaactgagtctgctgtcggcacggcaaagtctaaataaaaaaatcccagaatcaatgaataaataaacaagcttgttgttgatttaaaatcaagtgtttttatttcatttttcgcgcacggtatgccctagaccaccgatctctatcattgagaactcggtggattttttccaggatcctatagaggtgggattgaatgtttagatacatgggcattaggccgtctttggggtggagatagctccattgaagggattcatgctccggggtagtgttgtaaatcacccagtcataacaaggtcgcagtgcatggtgttgcacaatatcttttagaagtaggctgattgccacagataagcccttggtgtaggtgtttacaaaccggttgagctgggatgggtgcattcggggtgaaattatgtgcattttggattggatttttaagttggcaatattgccgccaagatcccgtcttgggttcatgttatgaaggaccaccaagacggtgtatccggtacatttaggaaatttatcgtgcagcttggatggaaaagcgtggaaaaatttggagacacccttgtgtcctccaagattttccatgcactcatccatgataatagcaatggggccgtgggcagcggcgcgggcaaacacgttccgtgggtctgacacatcatagttatgttcctgagttaaatcatcataagccattttaatgaatttggggcggagagtaccagattggggtatgaatgttccttcgggccccggagcatagttcccctcacagatttgcatttcccaagctttcagttccgagggtggaatcatgtccacctggggggctatgaaaaacaccgtttctggggcgggggtgattaattgtgatgatagcaaatttctgagcaattgagatttgccacatccggtggggccataaatgattccgattacgggttgcaggtggtagtttagggaacggcaactgccgtcttctcgaagcaagggggccacctcgttcatcatttcccttacatgcatattttcccgcaccaaatccattaggaggcgctctcctcctagtgatagaagttcttgtagtgaggaaaagtttttcagcggtttcagaccgtcagccatgggcattttggagagagtttgctgcaaaagttctagtctgttccacagttcagtgatgtgttctatggcatctcgatccagcagacctcctcgtttcgcgggtttggacggctcctggaatagggtatgagacgatgggcgtccagcgctgccagggttcggtccttccagggtctcagtgttcgagtcagggttgtttccgtcacagtgaaggggtgtgcgcctgcttgggcgcttgccagggtgcgcttcagactcatcctgctggtcgaaaacttctgtcgcttggcgccctgtatgtcggccaagtagcagtttaccatgagttcgtagttgagcgcctcggctgcgtggcctttggcgcggagcttacctttggaagttttcttgcataccgggcagtataggcatttcagcgcatacaacttgggcgcaaggaaaacggattctggggagtatgcatctgcgccgcaggaggcgcaaacagtttcacattccaccagccaggttaaatccggttcattggggtcaaaaacaagttttccgccatattttttgatgcgtttcttacctttggtctccatgagttcgtgtcctcgttgagtgacaaacaggctgtccgtgtccccgtagactgattttacaggcctcttctccagtggagtgcctcggtcttcttcgtacaggaactctgaccactctgatacaaaggcgcgcgtccaggccagcacaaaggaggctatgtgggaggggtagcgatcgttgtcaaccagggggtccaccttttccaaagtatgcaaacacatgtcaccctcttcaacatccaggaatgtgattggcttgtaggtgtatttcacgtgacctggggtccccgctgggggggtataaaagggggcggttctttgctcttcctcactgtcttccggatcgctgtccaggaacgtcagctgttggggtaggtattccctctcgaaggcgggcatgacctctgcactcaggttgtcagtttctaagaacgaggaggatttgatattgacagtgccggttgagatgcctttcatgaggttttcgtccatctggtcagaaaacacaatttttttattgtcaagtttggtggcaaatgatccatacagggcgttggataaaagtttggcaatggatcgcatggtttggttcttttccttgtccgcgcgctctttggcggcgatgttgagttggacatactcgcgtgccaggcacttccattcggggaagatagttgttaattcatctggcacgattctcacttgccaccctcgattatgcaaggtaattaaatccacactggtggccacctcgcctcgaaggggttcattggtccaacagagcctacctcctttcctagaacagaaagggggaagtgggtctagcataagttcatcgggagggtctgcatccatggtaaagattcccggaagtaaatccttatcaaaatagctgatgggagtggggtcatctaaggccatttgccattctcgagctgccagtgcgcgctcatatgggttaaggggactgccccatggcatgggatgggtgagtgcagaggcatacatgccacagatgtcatagacgtagatgggatcctcaaagatgcctatgtaggttggatagcatcgcccccctctgatacttgctcgcacatagtcatatagttcatgtgatggcgctagcagccccggacccaagttggtgcgattgggtttttctgttctgtagacgatctggcgaaagatggcgtgagaattggaagagatggtgggtctttgaaaaatgttgaaatgggcatgaggtagacctacagagtctctgacaaagtgggcataagattcttgaagcttggttaccagttcggcggtgacaagtacgtctagggcgcagtagtcaagtgtttcttgaatgatgtcataacctggttggtttttcttttcccacagttcgcggttgagaaggtattcttcgcgatccttccagtactcttctagcggaaacccgtctttgtctgcacggtaagatcctagcatgtagaactgattaactgccttgtaagggcagcagcccttctctacgggtagagagtatgcttgagcagcttttcgtagcgaagcgtgagtaagggcaaaggtgtctctgaccatgactttgaggaattggtatttgaagtcgatgtcgtcacaggctccctgttcccagagttggaagtctacccgtttcttgtaggcggggttgggcaaagcgaaagtaacatcattgaagagaatcttgccggccctgggcatgaaattgcgagtgatgcgaaaaggctgtggtacttccgctcggttattgataacctgggcagctaggacgatctcgtcgaaaccgttgatgttgtgtcctacgatgtataattctatgaaacgcggcgtgcctctgacgtgaggtagcttactgagctcatcaaaggttaggtctgtggggtcagataaggcgtagtgttcgagagcccattcgtgcaggtgaggattcgctttaaggaaggaggaccagaggtccactgccagtgctgtttgtaactggtcccggtactgacgaaaatgccgtccgactgccattttttctggggtgacgcaatagaaggtttgggggtcctgccgccagcgatcccacttgagttttatggcgaggtcataggcgatgttgacgagccgctggtctccagagagtttcatgaccagcatgaaggggattagctgcttgccaaaggaccccatccaggtgtaggtttccacatcgtaggtgagaaagagcctttctgtgcgaggatgagagccaatcgggaagaactggatctcctgccaccagttggaggaatggctgttgatgtgatggaagtagaactccctgcgacgcgccgagcattcatgcttgtgcttgtacagacggccgcagtagtcgcagcgttgcacgggttgtatctcgtgaatgagttgtacctggcttcccttgacgagaaatttcagtgggaagccgaggcctggcgattgtatctcgtgctttactatgttgtctgcatcggcctgttcatcttctgtctcgatggtggtcatgctgacgagccctcgcgggaggcaagtccagacctcggcgcggcaggggcggagctcgaggacgagagcgcgcaggctggagctgtccagggtcctgagacgctgcggactcaggttagtaggcagtgtcaggagattaacttgcatgatcttttggagggcgtgcgggaggttcagatagtacttgatctcaacgggtccgttggtggagatgtcgatggcttgcagggttccgtgtcccttgggcgctaccaccgtgcccttgtttttcattttggacggcggtggctctgttgcttcttgcatgtttagaagcggtgtcgagggcgcgcaccgggcggcaggggcggctcgggacccggcggcatggctggcagtggtacgtcggcgccgcgcgcgggtaggttctggtactgcgccctgagaagactcgcatgcgcgacgacgcggcggttgacatcctggatctgacgcctctgggtgaaagctaccggccccgtgagcttgaacctgaaagagagttcaacagaatcaatctcggtatcgttgacggcggcttgcctaaggatttcttgcacgtcaccagagttgtcctggtaggcgatctccgccatgaactgctcgatctcttcctcttgaagatctccgcggcccgctctctcgacggtggccgcgaggtcgttggagatgcgcccaatgagttgagagaatgcattcatgcccgcctcgttccagacgcggctgtagaccacggcccccacgggatctctcgcgcgcatgaccacctgggcgaggttgagctccacgtggcgggtgaagaccgcatagttgcataggcgctggaaaaggtagttgagtgtggtggcgatgtgctcggtgacgaagaaatacatgatccatcgtctcagcggcatctcgctgacatcgcccagagcttccaagcgctccatggcctcgtagaagtccacggcaaaattaaaaaactgggagtttcgcgcggacacggtcaactcctcttccagaagacggataagttcggcgatggtggtgcgcacctcgcgctcgaaagcccctgggatttcttcctcaatctcttcttcttccactaacatctcttcctcttcaggtggggctgcaggaggagggggaacgcggcgacgccggcggcgcacgggcagacggtcgatgaatctttcaatgacctctccgcggcggcggcgcatggtttcagtgacggcgcggccgttctcgcgcggtcgcagagtaaaaacaccgccgcgcatctccttaaagtggtgactgggaggttctccgtttgggagggagagggcgctgattatacattttattaattggcccgtagggactgcacgcagagatctgatcgtgtcaagatccacgggatctgaaaacctttcgacgaaagcgtctaaccagtcacagtcacaaggtaggctgagtacggcttcttgtgggcgggggtggttatgtgttcggtctgggtcttctgtttcttcttcatctcgggaaggtgagacgatgctgctggtgatgaaattaaagtaggcagttctaagacggcggatggtggcgaggagcaccaggtctttgggtccggcttgctggatacgcaggcgattggccattccccaagcattatcctgacatctagcaagatctttgtagtagtcttgcatgagccgttctacgggcacttcttcctcacccgttctgccatgcatacgtgtgagtccaaatccgcgcattggttgtaccagtgccaagtcagctacgactctttcggcgaggatggcttgctgtacttgggtaagggtggcttgaaagtcatcaaaatccacaaagcggtggtaagctcctgtattaatggtgtaagcacagttggccatgactgaccagttaactgtctggtgaccagggcgcacgagctcggtgtatttaaggcgcgaataggcgcgggtgtcaaagatgtaatcgttgcaggtgcgcaccagatactggtaccctataagaaaatgcggcggtggttggcggtagagaggccatcgttctgtagctggagcgccaggggcgaggtcttccaacataaggcggtgatagccgtagatgtacctggacatccaggtgattcctgcggcggtagtagaagcccgaggaaactcgcgtacgcggttccaaatgttgcgtagcggcatgaagtagttcattgtaggcacggtttgaccagtgaggcgcgcgcagtcattgatgctctatagacacggagaaaatgaaagcgttcagcgactcgactccgtagcctggaggaacgtgaacgggttgggtcgcggtgtaccccggttcgagacttgtactcgagccggccggagccgcggctaacgtggtattggcactcccgtctcgacccagcctacaaaaatccaggatacggaatcgagtcgttttgctggtttccgaatggcagggaagtgagtcctattttttttttttgccgctcagatgcatcccgtgctgcgacagatgcgcccccaacaacagcccccctcgcagcagcagcagcagcaatcacaaaaggctgtccctgcaactactgcaactgccgccgtgagcggtgcgggacagcccgcctatgatctggacttggaagagggcgaaggactggcacgtctaggtgcgccttcacccgagcggcatccgcgagttcaactgaaaaaagattctcgcgaggcgtatgtgccccaacagaacctatttagagacagaagcggcgaggagccggaggagatgcgagcttcccgctttaacgcgggtcgtgagctgcgtcacggtttggaccgaagacgagtgttgcgggacgaggatttcgaagttgatgaaatgacagggatcagtcctgccagggcacacgtggctgcagccaaccttgtatcggcttacgagcagacagtaaaggaagagcgtaacttccaaaagtcttttaataatcatgtgcgaaccctgattgcccgcgaagaagttacccttggtttgatgcatttgtgggatttgatggaagctatcattcagaaccctactagcaaacctctgaccgcccagctgtttctggtggtgcaacacagcagagacaatgaggctttcagagaggcgctgctgaacatcaccgaacccgaggggagatggttgtatgatcttatcaacattctacagagtatcatagtgcaggagcggagcctgggcctggccgagaaggtggctgccatcaattactcggttttgagcttgggaaaatattacgctcgcaaaatctacaagactccatacgttcccatagacaaggaggtgaagatagatgggttctacatgcgcatgacgctcaaggtcttgaccctgagcgatgatcttggggtgtatcgcaatgacagaatgcatcgcgcggttagcgccagcaggaggcgcgagttaagcgacagggaactgatgcacagtttgcaaagagctctgactggagctggaaccgagggtgagaattacttcgacatgggagctgacttgcagtggcagcctagtcgcagggctctgagcgccgcgacggcaggatgtgagcttccttacatagaagaggcggatgaaggcgaggaggaagagggcgagtacttggaagactgatggcacaacccgtgttttttgctagatggaacagcaagcaccggatcccgcaatgcgggcggcgctgcagagccagccgtccggcattaactcctcggacgattggacccaggccatgcaacgtatcatggcgttgacgactcgcaaccccgaagcctttagacagcaaccccaggccaaccgtctatcggccatcatggaagctgtagtgccttcccgctctaatcccactcatgagaaggtcctggccatcgtgaacgcgttggtggagaacaaagctattcgtccagatgaggccggactggtatacaacgctctcttagaacgcgtggctcgctacaacagtagcaatgtgcaaaccaatttggaccgtatgataacagatgtacgcgaagccgtgtctcagcgcgaaaggttccagcgtgatgccaacctgggttcgctggtggcgttaaatgctttcttgagtactcagcctgctaatgtgccgcgtggtcaacaggattatactaactttttaagtgctttgagactgatggtatcagaagtacctcagagcgaagtgtatcagtccggtcctgattacttctttcagactagcagacagggcttgcagacggtaaatctgagccaagcttttaaaaaccttaaaggtttgtggggagtgcatgccccggtaggagaaagagcaaccgtgtctagcttgttaactccgaactcccgcctattattactgttggtagctcctttcaccgacagcggtagcatcgaccgtaattcctatttgggttacctactaaacctgtatcgcgaagccatagggcaaagtcaggtggacgagcagacctatcaagaaattacccaagtcagtcgcgctttgggacaggaagacactggcagtttggaagccactctgaacttcttgcttaccaatcggtctcaaaagatccctcctcaatatgctcttactgcggaggaggagaggatccttagatatgtgcagcagagcgtgggattgtttctgatgcaagagggggcaactccgactgcagcactggacatgacagcgcgaaatatggagcccagcatgtatgccagtaaccgacctttcattaacaaactgctggactacttgcacagagctgccgctatgaactctgattatttcaccaatgccatcttaaacccgcactggctgcccccacctggtttctacacgggcgaatatgacatgcccgaccctaatgacggatttctgtgggacgacgtggacagcgatgttttttcacctctttctgatcatcgcacgtggaaaaaggaaggcggcgatagaatgcattcttctgcatcgctgtccggggtcatgggtgctaccgcggctgagcccgagtctgcaagtccttttcctagtctacccttttctctacacagtgtacgtagcagcgaagtgggtagaataagtcgcccgagtttaatgggcgaagaggagtatctaaacgattccttgctcagaccggcaagagaaaaaaatttcccaaacaatggaatagaaagtttggtggataaaatgagtagatggaagacttatgctcaggatcacagagacgagcctgggatcatggggattacaagtagagcgagccgtagacgccagcgccatgacagacagaggggtcttgtgtgggacgatgaggattcggccgatgatagcagcgtgctggacttgggtgggagaggaaggggcaacccgtttgctcatttgcgccctcgcttgggtggtatgttgtaaaaaaaaataaaaaaaaaactcaccaaggccatggcgacgagcgtacgttcgttcttctttattatctgtgtctagtataatgaggcgagtcgtgctaggcggagcggtggtgtatccggagggtcctcctccttcgtacgagagcgtgatgcagcagcagcaggcgacggcggtgatgcaatccccactggaggctccctttgtgcctccgcgatacctggcacctacggagggcagaaacagcattcgttattcggaactggcacctcagtacgataccaccaggttgtatctggtggacaacaagtcggcggacattgcttctctgaactatcagaatgaccacagcaacttcttgaccacggtggtgcaaaacaatgactttacccctacggaagccagcacccagaccattaactttgatgaacgatcgcggtggggcggtcagctaaagaccatcatgcatactaacatgccaaacgtgaacgagtatatgtttagtaacaagttcaaagcgcgtgtgatggtgtccagaaaacctcccgacggtgctgcagttggggatacttatgatcacaagcaggatattttgaaatatgagtggttcgagtttactttgccagaaggcaacttttcagttactatgactattgatttgatgaacaatgccatcatagataattacttgaaagtgggtagacagaatggagtgcttgaaagtgacattggtgttaagttcgacaccaggaacttcaagctgggatgggatcccgaaaccaagttgatcatgcctggagtgtatacgtatgaagccttccatcctgacattgtcttactgcctggctgcggagtggattttaccgagagtcgtttgagcaaccttcttggtatcagaaaaaaacagccatttcaagagggttttaagattttgtatgaagatttagaaggtggtaatattccggccctcttggatgtagatgcctatgagaacagtaagaaagaacaaaaagccaaaatagaagctgctacagctgctgcagaagctaaggcaaacatagttgccagcgactctacaagggttgctaacgctggagaggtcagaggagacaattttgcgccaacacctgttccgactgcagaatcattattggccgatgtgtctgaaggaacggacgtgaaactcactattcaacctgtagaaaaagatagtaagaatagaagctataatgtgttggaagacaaaatcaacacagcctatcgcagttggtatctttcgtacaattatggcgatcccgaaaaaggagtgcgttcctggacattgctcaccacctcagatgtcacctgcggagcagagcaggtctactggtcgcttccagacatgatgaaggatcctgtcactttccgctccactagacaagtcagtaactaccctgtggtgggtgcagagcttatgcccgtcttctcaaagagcttctacaacgaacaagctgtgtactcccagcagctccgccagtccacctcgcttacgcacgtcttcaaccgctttcctgagaaccagattttaatccgtccgccggcgcccaccattaccaccgtcagtgaaaacgttcctgctctcacagatcacgggaccctgccgttgcgcagcagtatccggggagtccaacgtgtgaccgttactgacgccagacgccgcacctgtccctacgtgtacaaggcactgggcatagtcgcaccgcgcgtcctttcaagccgcactttctaaaaaaaaaaaaaatgtccattcttatctcgcccagtaataacaccggttggggtctgcgcgctccaagcaagatgtacggaggcgcacgcaaacgttctacccaacatcctgtccgtgttcgcggacattttcgcgctccatggggcgccctcaagggccgcactcgcgttcgaaccaccgtcgatgatgtaatcgatcaggtggttgccgacgcccgtaattatactcctactgcgcctacatctactgtggatgcagttattgacagtgtagtggctgacgctcgcaactatgctcgacgtaagagccggcgaaggcgcattgccagacgccaccgagctaccactgccatgcgagccgcaagagctctgctacgaagagctagacgcgtggggcgaagagccatgcttagggcggccagacgtgcagcttcgggcgccagcgccggcaggtcccgcaggcaagcagccgctgtcgcagcggcgactattgccgacatggcccaatcgcgaagaggcaatgtatactgggtgcgtgacgctgccaccggtcaacgtgtacccgtgcgcacccgtccccctcgcacttagaagatactgagcagtctccgatgttgtgtcccagcggcgaggatgtccaagcgcaaatacaaggaagaaatgctgcaggttatcgcacctgaagtctacggccaaccgttgaaggatgaaaaaaaaccccgcaaaatcaagcgggttaaaaaggacaaaaaagaagaggaagatggcgatgatgggctggcggagtttgtgcgcgagtttgccccacggcgacgcgtgcaatggcgtgggcgcaaagttcgacatgtgttgagacctggaacttcggtggtctttacacccggcgagcgttcaagcgctacttttaagcgttcctatgatgaggtgtacggggatgatgatattcttgagcaggcggctgaccgattaggcgagtttgcttatggcaagcgtagtagaataacttccaaggatgagacagtgtcgatacccttggatcatggaaatcccacccctagtcttaaaccggtcactttgcagcaagtgttacccgtaactccgcgaacaggtgttaaacgcgaaggtgaagatttgtatcccactatgcaactgatggtacccaaacgccagaagttggaggacgttttggagaaagtaaaagtggatccagatattcaacctgaggttaaagtgagacccattaagcaggtagcgcctggtctgggggtacaaactgtagacattaagattcccactgaaagtatggaagtgcaaactgaacccgcaaagcctactgccacctccactgaagtgcaaacggatccatggatgcccatgcctattacaactgacgccgccggtcccactcgaagatcccgacgaaagtacggtccagcaagtctgttgatgcccaattatgttgtacacccatctattattcctactcctggttaccgaggcactcgctactatcgcagccgaaacagtacctcccgccgtcgccgcaagacacctgcaaatcgcagtcgtcgccgtagacgcacaagcaaaccgactcccggcgccctggtgcggcaagtgtaccgcaatggtagtgcggaacctttgacactgccgcgtgcgcgttaccatccgagtatcatcacttaatcaatgttgccgctgcctccttgcagatatggccctcacttgtcgccttcgcgttcccatcactggttaccgaggaagaaactcgcgccgtagaagagggatgttgggacgcggaatgcgacgctacaggcgacggcgtgctatccgcaagcaattgcggggtggttttttaccagccttaattccaattatcgctgctgcaattggcgcgataccaggcatagcttccgtggcggttcaggcctcgcaacgacattgacattggaaaaaaacgtataaataaaaaaaaaaaaatacaatggactctgacactcctggtcctgtgactatgttttcttagagatggaagacatcaatttttcatccttggctccgcgacacggcacgaagccgtacatgggcacctggagcgacatcggcacgagccaactgaacgggggcgccttcaattggagcagtatctggagcgggcttaaaaattttggctcaaccataaaaacatacgggaacaaagcttggaacagcagtacaggacaggcgcttagaaataaacttaaagaccagaacttccaacaaaaagtagtcgatgggatagcttccggcatcaatggagtggtagatttggctaaccaggctgtgcagaaaaagataaacagtcgtttggacccgccgccagcaaccccaggtgaaatgcaagtggaggaagaaattcctccgccagaaaaacgaggcgacaagcgtccgcgtcccgatttggaagagacgctggtgacgcgcgtagatgaaccgccttcttatgaggaagcaacgaagcttggaatgcccaccactagaccgatagccccaatggccaccggggtgatgaaaccttctcagttgcatcgacccgtcaccttggatttgccccctccccctgctgctactgctgtacccgcttctaagcctgtcgctgccccgaaaccagtcgccgtagccaggtcacgtcccgggggcgctcctcgtccaaatgcgcactggcaaaatactctgaacagcatcgtgggtctaggcgtgcaaagtgtaaaacgccgtcgctgcttttaattaaatatggagtagcgcttaacttgcctatctgtgtatatgtgtcattacacgccgtcacagcagcagaggaaaaaaggaagaggtcgtgcgtcgacgctgagttactttcaagatggccaccccatcgatgctgccccaatgggcatacatgcacatcgccggacaggatgcttcggagtacctgagtccgggtctggtgcagttcgcccgcgccacagacacctacttcaatctgggaaataagtttagaaatcccaccgtagcgccgacccacgatgtgaccaccgaccgtagccagcggctcatgttgcgcttcgtgcccgttgaccgggaggacaatacatactcttacaaagtgcggtacaccctggccgtgggcgacaacagagtgctggatatggccagcacgttctttgacattaggggtgtgttggacagaggtcccagtttcaaaccctattctggtacggcttacaactccctggctcctaaaggcgctccaaatacatctcagtggattgcagaaggtgtaaaaaatacaactggtgaggaacacgtaacagaagaggaaaccaatactactacttacacttttggcaatgctcctgtaaaagctgaagctgaaattacaaaagaaggactcccagtaggtttggaagtttcagatgaagaaagtaaaccgatttatgctgataaaacatatcagccagaacctcagctgggagatgaaacttggactgaccttgatggaaaaaccgaaaagtatggaggcagggctctcaaacccgatactaagatgaaaccatgctacgggtcctttgccaaacctactaatgtgaaaggcggtcaggcaaaacaaaaaacaacggagcagccaaatcagaaagtcgaatatgatatcgacatggagttttttgatgcggcatcgcagaaaacaaacttaagtcctaaaattgtcatgtatgcagaaaatgtaaatttggaaactccagacactcatgtagtgtacaaacctggaacagaagacacaagttccgaagctaatttgggacaacaatctatgcccaacagacccaactacattggcttcagagataactttattggacttatgtactataacagtactggtaacatgggggtgctggctggtcaagcgtctcagttaaatgcagtggttgacttgcaggacagaaacacagaactttcttaccaactcttgcttgactctctgggcgacagaaccagatactttagcatgtggaatcaggctgtggacagttatgatcctgatgtacgtgttattgaaaatcatggtgtggaagatgaacttcccaactactgttttccactggacggcataggtgttccaacaaccagttacaaatcaatagttccaaatggagacaatgcgcctaattggaaggaacctgaagtaaatggaacaagtgagatcggacagggtaatttgtttgccatggaaattaaccttcaagccaatctatggcgaagtttcctttattccaatgtggctctatatctcccagactcgtacaaatacaccccgtccaatgtcactcttccagaaaacaaaaacacctacgactacatgaacgggcgggtggtgccgccatctctagtagacacctatgtgaacattggtgccaggtggtctctggatgccatggacaatgtcaacccattcaaccaccaccgtaacgctggcttgcgttaccgatccatgcttctgggtaacggacgttatgtgcctttccacatacaagtgcctcaaaaattcttcgctgttaaaaacctgctgcttctcccaggctcctacacttatgagtggaactttaggaaggatgtgaacatggttctacagagttccctcggtaacgacctgcgggtagatggcgccagcatcagtttcacgagcatcaacctctatgctacttttttccccatggctcacaacaccgcttccacccttgaagccatgctgcggaatgacaccaatgatcagtcattcaacgactacctatctgcagctaacatgctctaccccattcctgccaatgcaaccaatattcccatttccattccttctcgcaactgggcggctttcagaggctggtcatttaccagactgaaaaccaaagaaactccctctttggggtctggatttgacccctactttgtctattctggttctattccctacctggatggtaccttctacctgaaccacacttttaagaaggtttccatcatgtttgactcttcagtgagctggcctggaaatgacaggttactatctcctaacgaatttgaaataaagcgcactgtggatggcgaaggctacaacgtagcccaatgcaacatgaccaaagactggttcttggtacagatgctcgccaactacaacatcggctatcagggcttctacattccagaaggatacaaagatcgcatgtattcatttttcagaaacttccagcccatgagcaggcaggtggttgatgaggtcaattacaaagacttcaaggccgtcgccataccctaccaacacaacaactctggctttgtgggttacatggctccgaccatgcgccaaggtcaaccctatcccgctaactatccctatccactcattggaacaactgccgtaaatagtgttacgcagaaaaagttcttgtgtgacagaaccatgtggcgcataccgttctcgagcaacttcatgtctatgggggcccttacagacttgggacagaatatgctctatgccaactcagctcatgctctggacatgacctttgaggtggatcccatggatgagcccaccctgctttatcttctcttcgaagttttcgacgtggtcagagtgcatcagccacaccgcggcatcatcgaggcagtctacctgcgtacaccgttctcggccggtaacgctaccacgtaagaagcttcttgcttcttgcaaatagcagctgcaaccatggcctgcggatcccaaaacggctccagcgagcaagagctcagagccattgtccaagacctgggttgcggaccctattttttgggaacctacgataagcgcttcccggggttcatggcccccgataagctcgcctgtgccattgtaaatacggccggacgtgagacggggggagagcactggttggctttcggttggaacccacgttctaacacctgctacctttttgatccttttggattctcggatgatcgtctcaaacagatttaccagtttgaatatgagggtctcctgcgccgcagcgctcttgctaccaaggaccgctgtattacgctggaaaaatctacccagaccgtgcagggtccccgttctgccgcctgcggacttttctgctgcatgttccttcacgcctttgtgcactggcctgaccgtcccatggacggaaaccccaccatgaaattgctaactggagtgccaaacaacatgcttcattctcctaaagtccagcccaccctgtgtgacaatcaaaaagcactctaccattttcttaatacccattcgccttattttcgctcccatcgtacacacatcgaaagggccactgcgttcgaccgtatggatgttcaataatgactcatgtaaacaacgtgttcaataaacatcactttatttttttacatgtatcaaggctctgcattacttatttatttacaagtcgaatgggttctgacgagaatcagaatgacccgcaggcagtgatacgttgcggaactgatacttgggttgccacttgaattcgggaatcaccaacttgggaaccggtatatcgggcaggatgtcactccacagctttctggtcagctgcaaagctccaagcaggtcaggagccgaaatcttgaaatcacaattaggaccagtgctttgagcgcgagagttgcggtacaccggattgcagcactgaaacaccatcagcgacggatgtctcacgcttgccagcacggtgggatctgcaatcatgcccacatccagatcttcagcattggcaatgctgaacggggtcatcttgcaggtctgcctacccatggcgggcacccaattaggcttgtggttgcaatcgcagtgcagggggatcagtatcatcttggcctgatcctgtctgattcctggatacacggctctcatgaaagcatcatattgcttgaaagcctgctgggctttactaccctcggtataaaacatcccgcaggacctgctcgaaaactggttagctgcacagccggcatcattcacacagcagcgggcgtcattgttagctatttgcaccacacttctgccccagcggttttgggtgattttggttcgctcgggattctcctttaaggctcgttgtccgttctcgctggccacatccatctcgataatctgctccttctgaatcataatattgccatgcaggcacttcagcttgccctcataatcattgcagccatgaggccacaacgcacagcctgtacattcccaattatggtgggcgatctgagaaaaagaatgtatcattccctgcagaaatcttcccatcatcgtgctcagtgtcttgtgactagtgaaagttaactggatgcctcggtgctcctcgtttacgtactggtgacagatgcgcttgtattgttcgtgttgctcaggcattagtttaaaagaggttctaagttcgttatccagcctgtacttctccatcagcagacacatcacttccatgcctttctcccaagcagacaccaggggcaagctaatcggattcttaacagtgcaggcagcagctcctttagccagagggtcatctttagcgatcttctcaatgcttcttttgccatccttctcaacgatgcgcacgggcgggtagctgaaacccactgctacaagttgcgcctcttctctttcttcttcgctgtcttgactgatgtcttgcatggggatatgtttggtcttccttggcttctttttggggggtatcggaggaggaggactgtcgctccgttccggagacagggaggattgtgacgtttcgctcaccattaccaactgactgtcggtagaagaacctgaccccacacggcgacaggtgtttctcttcgggggcagaggtggaggcgattgcgaagggctgcggtccgacctggaaggcggatgactggcagaaccccttccgcgttcgggggtgtgctccctgtggcggtcgcttaactgatttccttcgcggctggccattgtgttctcctaggcagagaaacaacagacatggaaactcagccattgctgtcaacatcgccacgagtgccatcacatctcgtcctcagcgacgaggaaaaggagcagagcttaagcattccaccgcccagtcctgccaccacctctaccctagaagataaggaggtcgacgcatctcatgacatgcagaataaaaaagcgaaagagtctgagacagacatcgagcaagacccgggctatgtgacaccggtggaacacgaggaagagttgaaacgctttctagagagagaggatgaaaactgcccaaaacaacgagcagataactatcaccaagatgctggaaatagggatcagaacaccgactacctcatagggcttgacggggaagacgcgctccttaaacatctagcaagacagtcgctcatagtcaaggatgcattattggacagaactgaagtgcccatcagtgtggaagagctcagccgcgcctacgagcttaacctcttttcacctcgtactccccccaaacgtcagccaaacggcacctgcgagccaaatcctcgcttaaacttttatccagcttttgctgtgccagaagtactggctacctatcacatcttttttaaaaatcaaaaaattccagtctcctgccgcgctaatcgcacccgcgccgatgccctactcaatctgggacctggttcacgcttacctgatatagcttccttggaagaggttccaaagatcttcgagggtctgggcaataatgagactcgggccgcaaatgctctgcaaaagggagaaaatggcatggatgagcatcacagcgttctggtggaattggaaggcgataatgccagactcgcagtactcaagcgaagcatcgaggtcacacacttcgcatatcccgctgtcaacctgccccctaaagtcatgacggcggtcatggaccagttactcattaagcgcgcaagtcccctttcagaagacatgcatgacccagatgcctgtgatgagggtaaaccagtggtcagtgatgagcagctaacccgatggctgggcaccgactctcccagggatttggaagagcgtcgcaagcttatgatggccgtggtgctggttaccgtagaactagagtgtctccgacgtttctttaccgattcagaaaccttgcgcaaactcgaagagaatctgcactacacttttagacacggctttgtgcggcaggcatgcaagatatctaacgtggaactcaccaacctggtttcctacatgggtattctgcatgagaatcgcctaggacaaagcgtgctgcacagcaccctgaagggggaagcccgccgtgattacatccgcgattgtgtctatctgtacctgtgccacacgtggcaaaccggcatgggtgtatggcagcaatgtttagaagaacagaacttgaaagagcttgacaagctcttacagaaatctcttaaggttctgtggacagggttcgacgagcgcaccgtcgcttccgacctggcagacctcatcttcccagagcgtctcagggttactttgcgaaacggattgcctgactttatgagccagagcatgcttaacaattttcgctctttcatcctggaacgctccggtatcctgcccgccacctgctgcgcactgccctccgactttgtgcctctcacctaccgcgagtgccccccgccgctatggagtcactgctacctgttccgtctggccaactatctctcctaccactcggatgtgatcgaggatgtgagcggagacggcttgctggagtgtcactgccgctgcaatctgtgcacgccccaccggtccctagcttgcaacccccagttgatgagcgaaacccagataataggcacctttgaattgcaaggccccagcagccaaggcgatgggtcttctcctgggcaaagtttaaaactgaccccgggactgtggacctccgcctacttgcgcaagtttgctccggaagattaccacccctatgaaatcaagttctatgaggaccaatcacagcctccaaaggccgaactttcggcctgcgtcatcacccagggggcaattctggcccaattgcaagccatccaaaaatcccgccaagaatttctactgaaaaagggtaagggggtctaccttgacccccagaccggcgaggaactcaacacaaggttccctcaggatgtcccaacgacgagaaaacaagaagttgaaggtgcagccgccgcccccagaagatatggaggaagattgggacagtcaggcagaggaggcggaggaggacagtctggaggacagtctggaggaagacagtttggaggaggaaaacgaggaggcagaggaggtggaagaagtaaccgccgacaaacagttatcctcggctgcggagacaagcaacagcgctaccatctccgctccgagtcgaggaacccggcggcgtcccagcagtagatgggacgagaccggacgcttcccgaacccaaccagcgcttccaagaccggtaagaaggatcggcagggatacaagtcctggcgggggcataagaatgccatcatctcctgcttgcatgagtgcgggggcaacatatccttcacgcggcgctacttgctattccaccatggggtgaactttccgcgcaatgttttgcattactaccgtcacctccacagcccctactatagccagcaaatcccggcagtctcgacagataaagacagcggcggcgacctccaacagaaaaccagcagcggcagttagaaaatacacaacaagtgcagcaacaggaggattaaagattacagccaacgagccagcgcaaacccgagagttaagaaatcggatctttccaaccctgtatgccatcttccagcagagtcggggtcaagagcaggaactgaaaataaaaaaccgatctctgcgttcgctcaccagaagttgtttgtatcacaagagcgaagatcaacttcagcgcactctcgaggacgccgaggctctcttcaacaagtactgcgcgctgactcttaaagagtaggcagcgaccgcgcttattcaaaaaaggcgggaattacatcatcctcgacatgagtaaagaaattcccacgccttacatgtggagttatcaaccccaaatgggattggcggcaggcgcctcccaggactactccacccgcatgaattggctcagcgccgggccttctatgatttctcgagttaatgatatacgcgcctaccgaaaccaaatacttttggaacagtcagctcttaccaccacgccccgccaacaccttaatcccagaaattggcccgccgccctagtgtaccaggaaagtcccgctcccaccactgtattacttcctcgagacgcccaggccgaagtccaaatgactaatgcaggtgcgcagttagctggcggctccaccctatgtcgtcacaggcctcggcataatataaaacgcctgatgatcagaggccgaggtatccagctcaacgacgagtcggtgagctctccgcttggtctacgaccagacggaatctttcagattgccggctgcgggagatcttccttcacccctcgtcaggctgttctgactttggaaagttcgtcttcgcaaccccgctcgggcggaatcgggaccgttcaatttgtggaggagtttactccctctgtctacttcaaccccttctccggatctcctgggcattacccggacgagttcataccgaacttcgacgcgattagcgagtcagtggacggctacgattgatgtctggtgacgcggctgagctatctcggctgcgacatctagaccactgccgccgctttcgctgctttgcccgggaactcattgagttcatctacttcgaactccccaaggatcaccctcaaggtccggcccacggagtgcggatttctatcgaaggcaaaatagactctcgcctgcaacgaattttctcccagcggcccgtgctgatcgagcgagaccagggaaacaccacggtttccatctactgcatttgtaatcaccccggattgcatgaaagcctttgctgtcttatgtgtactgagtttaataaaaactgaattaagactctcctacggactgccgcttcttcaacccggattttacaaccagaagaacgaaacttttcctgtcgtccaggactctgttaacttcacctttcctactcacaaactagaagctcaacgactacaccgcttttccagaagcattttccctactaatactactttcaaaaccggaggtgagctccaaggtcttcctacagaaaacccttgggtggaagcgggccttgtagtgctaggaattcttgcgggtgggcttgtgattattctttgctacctatacacaccttgcttcactttcttagtggtgttgtggtattggtttaaaaaatggggcccatactagtcttgcttgttttactttcgcttttggaaccgggttctgccaattacgatccatgtctagacttcgacccagaaaactgcacacttacttttgcacccgacacaagccgcatctgtggagttcatcgcctctcttacgaacttggcccccaacgacaaaaatttacctgcatggtgggaatcaaccccatagttatcacccagcaaagtggagatactaagggttgcattcactgctcctgcgattccatcgagtgcacctacaccctgctgaagaccctatgcggcctaagagacctgctaccaatgaattaaaaaatgattaataaaaaatcacttacttgaaatcagcaataaggtctctgttgaaattttctcccagcagcacctcacttccctcttcccaactctggtattctaaaccccgttcagcggcatactttctccatactttaaaggggatgtcaaattttagctcctctcctgtacccacaatcttcatgtctttcttcccagatgaccaagagagtccggctcagtgactccttcaaccctgtctacccctatgaagatgaaagcacctcccaacacccctttataaacccagggtttatttccccaaatggcttcacacaaagcccaaacggagttcttactttaaaatgtttaaccccactaacaaccacaggcggatctctacagctaaaagtgggagggggacttacagtggatgacaccaacggttttttgaaagaaaacataagtgccaccacaccactcgttaagactggtcactctataggtttaccactaggagccggattgggaacgaatgaaaataaactttgtatcaaattaggacaaggacttacattcaattcaaacaacatttgcattgatgacaatattaacaccttatggacaggagtcaaccccaccgaagccaactgtcaaatcatgaactccagtgaatctaatgattgcaaattaattctaacactagttaaaactggagcactagtcactgcatttgtttatgttataggagtatctaacaattttaatatgctaactacacacagaaatataaattttactgcagagctgtttttcgattctactggtaatttactaactagactctcatccctcaaaactccacttaatcataaatcaggacaaaacatggctactggtgccattactaatgctaaaggtttcatgcccagcacgactgcctatcctttcaatgataattctagagaaaaagaaaactacatttacggaacttgttactacacagctagtgatcgcactgcttttcccattgacatatctgtcatgcttaaccgaagagcaataaatgacgagacatcatattgtattcgtataacttggtcctggaacacaggagatgccccagaggtgcaaacctctgctacaaccctagtcacctccccatttaccttttactacatcagagaagacgactgacaaataaagtttgcgatcgctaccctgcaggaacttgtttatttgaaaatcaattcacaaaatccgagtagttattttgcctcccccttcccatttaacagaatacaccaatctctccccacgcacagctttaaacatttggataccattagatatagacatggttttagattccacattccaaacagtttcagagcgagccaatctggggtcagtgatagataaaaatccatcgggatagtcttttaaagcgctttcacagtccaactgctgcggatgcgactccggagtctggatcacggtcatctggaagaagaacgatgggaatcataatccgaaaacggtatcggacgattgtgtctcatcaaacccacaagcagccgctgtctgcgtcgctccgtgcgactgctgtttatgggatcagggtccacagtgtcctgaagcatgattttaatagcccttaacatcaactttctggtgcgatgcgcgcagcaacgcattctgatttcactcaaatctttgcagtaggtacaacacattattacaatattgtttaataaaccataattaaaagcgctccagccaaaactcatatctgatataatcgcccctgcatgaccatcataccaaagtttaatataaattaaatgacgttccctcaaaaacacactacccacatacatgatctcttttggcatgtgcatattaacaatctgtctgtaccatggacaacgttggttaatcatgcaacccaatataaccttccggaaccacactgccaacaccgctcccccagccatgcattgaagtgaaccctgctgattacaatgacaatgaagaacccaattctctcgaccgtgaatcacttgagaatgaaaaatatctatagtggcacaacatagacataaatgcatgcatcttctcataatttttaactcctcaggatttagaaacatatcccagggaataggaagctcttgcagaacagtaaagctggcagaacaaggaagaccacgaacacaacttacactatgcatagtcatagtatcacaatctggcaacagcgggtggtcttcagtcatagaagctcgggtttcattttcctcacaacgtggtaactgggctctggtgtaagggtgatgtctggcgcatgatgtcgagcgtgcgcgcaaccttgtcataatggagttgcttcctgacattctcgtattttgtatagcaaaacgcggccctggcagaacacactcttcttcgccttctatcctgccgcttagcgtgttccgtgtgatagttcaagtacaaccacactcttaagttggtcaaaagaatgctggcttcagttgtaatcaaaactccatcgcatctaatcgttctgaggaaatcatccaagcaatgcaactggattgtgtttcaagcaggagaggagagggaagagacggaagaaccatgttaatttttattccaaacgatctcgcagtacttcaaattgtagatcgcgcagatggcatctctcgcccccactgtgttggtgaaaaagcacagctagatcaaaagaaatgcgattttcaaggtgctcaacggtggcttccagcaaagcctccacgcgcacatccaagaacaaaagaataccaaaagaaggagcattttctaactcctcaatcatcatattacattcctgcaccattcccagataattttcagctttccagccttgaattattcgtgtcagttcttgtggtaaatccaatccacacattacaaacaggtcccggagggcgccctccaccaccattcttaaacacaccctcataatgacaaaatatcttgctcctgtgtcacctgtagcgaattgagaatggcaacatcaattgacatgcccttggctctaagttcttctttaagttctagttgtaaaaactctctcatattatcaccaaactgcttagccagaagccccccgggaacaagagcaggggacgctacagtgcagtacaagcgcagacctccccaattggctccagcaaaaacaagattggaataagcatattgggaaccgccagtaatatcatcgaagttgctggaaatataatcaggcagagtttcttgtaaaaattgaataaaagaaaaatttgccaaaaaaacattcaaaacctctgggatgcaaatgcaataggttaccgcgctgcgctccaacattgttagttttgaattagtctgcaaaaataaaaaaaaaaacaagcgtcatatcatagtagcctgacgaacagatggataaatcagtctttccatcacaagacaagccacagggtctccagctcgaccctcgtaaaacctgtcatcatgattaaacaacagcaccgaaagttcctcgcggtgaccagcatgaataattcttgatgaagcatacaatccagacatgttagcatcagttaacgagaaaaaacagccaacatagcctttgggtataattatgcttaatcgtaagtatagcaaagccacccctcgcggatacaaagtaaaaggcacaggagaataaaaaatataattatttctctgctgctgttcaggcaacgtcgcccccggtccctctaaatacacatacaaagcctcatcagccatggcttaccagacaaagtacagcgggcacacaaagcacaagctctaaagtgactctccaacctctccacaatatatatatacacaagccctaaactgacgtaatgggagtaaagtgtaaaaaatcccgccaaacccaacacacaccccgaaactgcgtcaccagggaaaagtacagtttcacttccgcaatcccaacaggcgtaacttcctctttctcacggtacgtgatatcccactaacttgcaacgtcattttcccacggtcgcaccgccccttttagccgttaaccccacagccaatcaccacacgatccacactttttaaaatcacctcatttacatattggcaccattccatctataaggtatattatatagataggcgcgccctctcttaaggtagcatcgggatcgagtccctgagagaacatcctcaatcccgatctatccttagatccgaggaatatcgaaatcagttacgctagggataacagggtaatatagcatcccctcggattgctatctaccggctcgtcagctatgatctctcgatttcgatcaagaaatctcattggttaccttgggctatcgaaaccagtcaagtcagctacttggcgagatcgacttgtctgagtttcgactacgctcagaattgcgtcagcgcctatcgccaggtattactccaatcccgaatatccgagcctgagagaacatcctcaatcccgatctatccttagatccgaggaatatcgaaatcgtttaaatcttttcttgatggtaaatcattcgaatataagaatggagagacgaatggggaaacgacaaagatgacattctttggtccttctggtgaggttctcaagtttttggttaatcctgtcaacaacttatatcgtatggggctgacttcaggtgctacatttgaagagataaattgcactgaaatctagtaatattttatctgattaataagatgatcttcttgagatcgttttggtctgcgcgtaatctcttgctctgaaaacgaaaaaaccgccttgcagggcggtttttcgaaggttctctgagctaccaactctttgaaccgaggtaactggcttggcagagcgcagtcaccaaaacttgtcctttcagtttagccttaaccggcgcatgacttcaagactaactctgctaaatcaattaccagtggctgctgccagtggtgcttttgcatgtctttccgggttggactcaagacgatagttaccggataaggcgcagcggtcggactgaacggggggttcgtgcatacagtccagcttggagcgaactgcctacccggaactgagtgtcaggcgtggaatgagacaaacgcggccataacagcggaatgacaccggtaaaccgaaaggcaggaacaggagagcgcacgagggagccgccagggggaaacgcctggtatctttatagtcctgtcgggtttcgccaccactgatttgagcgtcagatttcgtgatgcttgtcaggggggcggagcctatggaaaaacggctttgccgcggccctctcacttccctgttaagtatcttcctggcatcttccaggaaatctccgccccgttcgtaagccatttccgctcgccgcagtcgaacgaccgagcgtagcgagtcagtgagcgaggaagcggaatatatcctgtatcacatattctgctgacgcaccggtgcggccttttttctcctgccacatgaagcacttcactgacaccctcatcagtgccaacatagtaagccagtatacactccgctaatttaaacgtggtgtaccgagaacgatcctctcagtgcgatctcgacgatcagtggtattccgacatatcgttgcttggcagtcagccagtcgatcctagcttgggacccaggaagtccaatcgtcagatattgtactcagcctggtcacggcagcgtaccgatctcgtaactataacggtcctaaggtagcgaactagatattgatagtctgatcggtcaacgtataatcgagtcctagcttttgcaaacatctatcaagagacaggatcagcaggaggctttcgcatgattgaacaagatggattgcacgcaggttctccggcggcttgggtggagaggctattcggctatgactgggcacaacagacaatcggctgctctgatgccgccgtgttccggctgtcagcgcaggggcgtccggttctttttgtcaagaccgacctgtccggtgccctgaatgaactgcaagacgaggcagcgcggctatcgtggctggcgacgacgggcgttccttgcgcggctgtgctcgacgttgtcactgaagcgggaagggactggctgctattgggcgaagtgccggggcaggatctcctgtcatctcaccttgctcctgccgagaaagtatccatcatggctgatgcaatgcggcggctgcatacgcttgatccggctacctgcccattcgaccaccaagcgaaacatcgcatcgagcgagcacgtactcggatggaagccggtcttgtcgatcaggatgatctggacgaagagcatcaggggctcgcgccagccgaactgttcgccaggctcaaggcgtctatgcccgacggcgaggatctcgtcgtgacccacggcgatgcctgcttgccgaatatcatggtggaaaatggccgcttttctggattcatcgactgtggccgtctgggtgtggcggaccgctatcaggacatagcgttggctacccgtgatattgctgaagagcttggcggcgaatgggctgaccgcttccttgtgctttacggtatcgccgcgcccgattcgcagcgcatcgccttctatcgccttcttgacgagttcttctgaccgattctaggtgcattggcgcagaaaaaaatgcctgatgcgacgctgcgcgtcttatactcccacatatgccagattcagcaacggatacggcttccccaacttgcccacttccatacgtgtcctccttaccagaaatttatccttaaggtccgtaactataacggtcctaaggtagcgaatcgacctagctctatcgaatctccctcgtttcgagcttacgcgaactagcctctggcgatagcatccgaggggcaggcatctatgtcgggtgcggagaaagaggtaatgtcaagttcgatctgattgcttggcataaagtccgatggttcgagtagactcagttcaacctctctcttaaggtagc

SEQ ID NO: 65 - DNA, 35231 bp, Artificial Sequence
  pNG-185 (pColoAd2.6) DNA plasmid, consisting of a bacterial origin of replication (p15A), an antibiotic resistance gene (KanR) and the EnAd genome sequence with inserted unique restriction sites in the BX and BY regions.
ggcgcgcctctatctatataatataccttatagatggaatggtgccaatatgtaaatgaggtgattttaaaaagtgtggatcgtgtggtgattggctgtggggttaacggctaaaaggggcggtgcgaccgtgggaaaatgacgttttgtgggggtggagtttttttgcaagttgtcgcgggaaatgtgacgcataaaaaggcttttttctcacggaactacttagttttcccacggtatttaacaggaaatgaggtagttttgaccggatgcaagtgaaaattgttgattttcgcgcgaaaactgaatgaggaagtgtttttctgaataatgtggtatttatggcagggtggagtatttgttcagggccaggtagactttgacccattacgtggaggtttcgattaccgtgttttttacctgaatttccgcgtaccgtgtcaaagtcttctgtttttacgtaggtgtcagctgatcgctagggtatttatacctcagggtttgtgtcaagaggccactcttgagtgccagcgagaagagttttctcctctgcgccggcagtttaataataaaaaaatgagagatttgcgatttctgcctcaggaaataatctctgctgagactggaaatgaaatattggagcttgtggtgcacgccctgatgggagacgatccggagccacctgtgcagctttttgagcctcctacgcttcaggaactgtatgatttagaggtagagggatcggaggattctaatgaggaagctgtaaatggcttttttaccgattctatgcttttagctgctaatgaagggttagaattagatccgcctttggacacttttgatactccaggggtaattgtggaaagcggtacaggtgtaagaaaattacctgatttgagttccgtggactgtgatttgcactgctatgaagacgggtttcctccgagtgatgaggaggaccatgaaaaggagcagtccatgcagactgcagcgggtgagggagtgaaggctgccaatgttggttttcagttggattgcccggagcttcctggacatggctgtaagtcttgtgaatttcacaggaaaaatactggagtaaaggaactgttatgttcgctttgttatatgagaacgcactgccactttatttacagtaagtgtgtttaagttaaaatttaaaggaatatgctgtttttcacatgtatattgagtgtgagttttgtgcttcttattataggtcctgtgtctgatgctgatgaatcaccatctcctgattctactacctcacctcctgagattcaagcacctgttcctgtggacgtgcgcaagcccattcctgtgaagcttaagcctgggaaacgtccagcagtggaaaaacttgaggacttgttacagggtggggacggacctttggacttgagtacacggaaacgtccaagacaataagtgttccatatccgtgtttacttaaggtgacgtcaatatttgtgtgacagtgcaatgtaataaaaatatgttaactgttcactggtttttattgctttttgggcggggactcaggtatataagtagaagcagacctgtgtggttagctcataggagctggctttcatccatggaggtttgggccattttggaagaccttaggaagactaggcaactgttagagaacgcttcggacggagtctccggtttttggagattctggttcgctagtgaattagctagggtagtttttaggataaaacaggactataaacaagaatttgaaaagttgttggtagattgcccaggactttttgaagctcttaatttgggccatcaggttcactttaaagaaaaagttttatcagttttagacttttcaaccccaggtagaactgctgctgctgtggcttttcttacttttatattagataaatggatcccgcagactcatttcagcaggggatacgttttggatttcatagccacagcattgtggagaacatggaaggttcgcaagatgaggacaatcttaggttactggccagtgcagcctttgggtgtagcgggaatcctgaggcatccaccggtcatgccagcggttctggaggaggaacagcaagaggacaacccgagagccggcctggaccctccagtggaggaggcggagtagctgacttgtctcctgaactgcaacgggtgcttactggatctacgtccactggacgggataggggcgttaagagggagagggcatctagtggtactgatgctagatctgagttggctttaagtttaatgagtcgcagacgtcctgaaaccatttggtggcatgaggttcagaaagagggaagggatgaagtttctgtattgcaggagaaatattcactggaacaggtgaaaacatgttggttggagcctgaggatgattgggaggtggccattaaaaattatgccaagatagctttgaggcctgataaacagtataagattactagacggattaatatccggaatgcttgttacatatctggaaatggggctgaggtggtaatagatactcaagacaaggcagttattagatgctgcatgatggatatgtggcctggggtagtcggtatggaagcagtaacttttgtaaatgttaagtttaggggagatggttataatggaatagtgtttatggccaataccaaacttatattgcatggttgtagcttttttggtttcaacaatacctgtgtagatgcctggggacaggttagtgtacggggatgtagtttctatgcgtgttggattgccacagctggcagaaccaagagtcaattgtctctgaagaaatgcatatttcaaagatgtaacctgggcattctgaatgaaggcgaagcaagggtccgccactgcgcttctacagatactggatgttttattttgattaagggaaatgccagcgtaaagcataacatgatttgcggtgcttccgatgagaggccttatcaaatgctcacttgtgctggtgggcattgtaatatgctggctactgtgcatattgtttcccatcaacgcaaaaaatggcctgtttttgatcacaatgtgatgacgaagtgtaccatgcatgcaggtgggcgtagaggaatgtttatgccttaccagtgtaacatgaatcatgtgaaagtgttgttggaaccagatgccttttccagaatgagcctaacaggaatttttgacatgaacatgcaaatctggaagatcctgaggtatgatgatacgagatcgagggtacgcgcatgcgaatgcggaggcaagcatgccaggttccagccggtgtgtgtagatgtgactgaagatctcagaccggatcatttggttattgcccgcactggagcagagttcggatccagtggagaagaaactgactaaggtgagtattgggaaaactttggggtgggattttcagatggacagattgagtaaaaatttgttttttctgtcttgcagctgtcatgagtggaaacgcttcttttaaggggggagtcttcagcccttatctgacagggcgtctcccatcctgggcaggagttcgtcagaatgttatgggatctactgtggatggaagacccgtccaacccgccaattcttcaacgctgacctatgctactttaagttcttcacctttggacgcagctgcagctgccgccgccgcttctgttgccgctaacactgtgcttggaatgggttactatggaagcatcatggctaattccacttcctctaataacccttctaccctgactcaggacaagttacttgtccttttggcccagctggaggctttgacccaacgtctgggtgaactttctcagcaggtggtcgagttgcgagtacaaactgagtctgctgtcggcacggcaaagtctaaataaaaaaatcccagaatcaatgaataaataaacaagcttgttgttgatttaaaatcaagtgtttttatttcatttttcgcgcacggtatgccctagaccaccgatctctatcattgagaactcggtggattttttccaggatcctatagaggtgggattgaatgtttagatacatgggcattaggccgtctttggggtggagatagctccattgaagggattcatgctccggggtagtgttgtaaatcacccagtcataacaaggtcgcagtgcatggtgttgcacaatatcttttagaagtaggctgattgccacagataagcccttggtgtaggtgtttacaaaccggttgagctgggatgggtgcattcggggtgaaattatgtgcattttggattggatttttaagttggcaatattgccgccaagatcccgtcttgggttcatgttatgaaggaccaccaagacggtgtatccggtacatttaggaaatttatcgtgcagcttggatggaaaagcgtggaaaaatttggagacacccttgtgtcctccaagattttccatgcactcatccatgataatagcaatggggccgtgggcagcggcgcgggcaaacacgttccgtgggtctgacacatcatagttatgttcctgagttaaatcatcataagccattttaatgaatttggggcggagagtaccagattggggtatgaatgttccttcgggccccggagcatagttcccctcacagatttgcatttcccaagctttcagttccgagggtggaatcatgtccacctggggggctatgaaaaacaccgtttctggggcgggggtgattaattgtgatgatagcaaatttctgagcaattgagatttgccacatccggtggggccataaatgattccgattacgggttgcaggtggtagtttagggaacggcaactgccgtcttctcgaagcaagggggccacctcgttcatcatttcccttacatgcatattttcccgcaccaaatccattaggaggcgctctcctcctagtgatagaagttcttgtagtgaggaaaagtttttcagcggtttcagaccgtcagccatgggcattttggagagagtttgctgcaaaagttctagtctgttccacagttcagtgatgtgttctatggcatctcgatccagcagacctcctcgtttcgcgggtttggacggctcctggaatagggtatgagacgatgggcgtccagcgctgccagggttcggtccttccagggtctcagtgttcgagtcagggttgtttccgtcacagtgaaggggtgtgcgcctgcttgggcgcttgccagggtgcgcttcagactcatcctgctggtcgaaaacttctgtcgcttggcgccctgtatgtcggccaagtagcagtttaccatgagttcgtagttgagcgcctcggctgcgtggcctttggcgcggagcttacctttggaagttttcttgcataccgggcagtataggcatttcagcgcatacaacttgggcgcaaggaaaacggattctggggagtatgcatctgcgccgcaggaggcgcaaacagtttcacattccaccagccaggttaaatccggttcattggggtcaaaaacaagttttccgccatattttttgatgcgtttcttacctttggtctccatgagttcgtgtcctcgttgagtgacaaacaggctgtccgtgtccccgtagactgattttacaggcctcttctccagtggagtgcctcggtcttcttcgtacaggaactctgaccactctgatacaaaggcgcgcgtccaggccagcacaaaggaggctatgtgggaggggtagcgatcgttgtcaaccagggggtccaccttttccaaagtatgcaaacacatgtcaccctcttcaacatccaggaatgtgattggcttgtaggtgtatttcacgtgacctggggtccccgctgggggggtataaaagggggcggttctttgctcttcctcactgtcttccggatcgctgtccaggaacgtcagctgttggggtaggtattccctctcgaaggcgggcatgacctctgcactcaggttgtcagtttctaagaacgaggaggatttgatattgacagtgccggttgagatgcctttcatgaggttttcgtccatctggtcagaaaacacaatttttttattgtcaagtttggtggcaaatgatccatacagggcgttggataaaagtttggcaatggatcgcatggtttggttcttttccttgtccgcgcgctctttggcggcgatgttgagttggacatactcgcgtgccaggcacttccattcggggaagatagttgttaattcatctggcacgattctcacttgccaccctcgattatgcaaggtaattaaatccacactggtggccacctcgcctcgaaggggttcattggtccaacagagcctacctcctttcctagaacagaaagggggaagtgggtctagcataagttcatcgggagggtctgcatccatggtaaagattcccggaagtaaatccttatcaaaatagctgatgggagtggggtcatctaaggccatttgccattctcgagctgccagtgcgcgctcatatgggttaaggggactgccccatggcatgggatgggtgagtgcagaggcatacatgccacagatgtcatagacgtagatgggatcctcaaagatgcctatgtaggttggatagcatcgcccccctctgatacttgctcgcacatagtcatatagttcatgtgatggcgctagcagccccggacccaagttggtgcgattgggtttttctgttctgtagacgatctggcgaaagatggcgtgagaattggaagagatggtgggtctttgaaaaatgttgaaatgggcatgaggtagacctacagagtctctgacaaagtgggcataagattcttgaagcttggttaccagttcggcggtgacaagtacgtctagggcgcagtagtcaagtgtttcttgaatgatgtcataacctggttggtttttcttttcccacagttcgcggttgagaaggtattcttcgcgatccttccagtactcttctagcggaaacccgtctttgtctgcacggtaagatcctagcatgtagaactgattaactgccttgtaagggcagcagcccttctctacgggtagagagtatgcttgagcagcttttcgtagcgaagcgtgagtaagggcaaaggtgtctctgaccatgactttgaggaattggtatttgaagtcgatgtcgtcacaggctccctgttcccagagttggaagtctacccgtttcttgtaggcggggttgggcaaagcgaaagtaacatcattgaagagaatcttgccggccctgggcatgaaattgcgagtgatgcgaaaaggctgtggtacttccgctcggttattgataacctgggcagctaggacgatctcgtcgaaaccgttgatgttgtgtcctacgatgtataattctatgaaacgcggcgtgcctctgacgtgaggtagcttactgagctcatcaaaggttaggtctgtggggtcagataaggcgtagtgttcgagagcccattcgtgcaggtgaggattcgctttaaggaaggaggaccagaggtccactgccagtgctgtttgtaactggtcccggtactgacgaaaatgccgtccgactgccattttttctggggtgacgcaatagaaggtttgggggtcctgccgccagcgatcccacttgagttttatggcgaggtcataggcgatgttgacgagccgctggtctccagagagtttcatgaccagcatgaaggggattagctgcttgccaaaggaccccatccaggtgtaggtttccacatcgtaggtgagaaagagcctttctgtgcgaggatgagagccaatcgggaagaactggatctcctgccaccagttggaggaatggctgttgatgtgatggaagtagaactccctgcgacgcgccgagcattcatgcttgtgcttgtacagacggccgcagtagtcgcagcgttgcacgggttgtatctcgtgaatgagttgtacctggcttcccttgacgagaaatttcagtgggaagccgaggcctggcgattgtatctcgtgctttactatgttgtctgcatcggcctgttcatcttctgtctcgatggtggtcatgctgacgagccctcgcgggaggcaagtccagacctcggcgcggcaggggcggagctcgaggacgagagcgcgcaggctggagctgtccagggtcctgagacgctgcggactcaggttagtaggcagtgtcaggagattaacttgcatgatcttttggagggcgtgcgggaggttcagatagtacttgatctcaacgggtccgttggtggagatgtcgatggcttgcagggttccgtgtcccttgggcgctaccaccgtgcccttgtttttcattttggacggcggtggctctgttgcttcttgcatgtttagaagcggtgtcgagggcgcgcaccgggcggcaggggcggctcgggacccggcggcatggctggcagtggtacgtcggcgccgcgcgcgggtaggttctggtactgcgccctgagaagactcgcatgcgcgacgacgcggcggttgacatcctggatctgacgcctctgggtgaaagctaccggccccgtgagcttgaacctgaaagagagttcaacagaatcaatctcggtatcgttgacggcggcttgcctaaggatttcttgcacgtcaccagagttgtcctggtaggcgatctccgccatgaactgctcgatctcttcctcttgaagatctccgcggcccgctctctcgacggtggccgcgaggtcgttggagatgcgcccaatgagttgagagaatgcattcatgcccgcctcgttccagacgcggctgtagaccacggcccccacgggatctctcgcgcgcatgaccacctgggcgaggttgagctccacgtggcgggtgaagaccgcatagttgcataggcgctggaaaaggtagttgagtgtggtggcgatgtgctcggtgacgaagaaatacatgatccatcgtctcagcggcatctcgctgacatcgcccagagcttccaagcgctccatggcctcgtagaagtccacggcaaaattaaaaaactgggagtttcgcgcggacacggtcaactcctcttccagaagacggataagttcggcgatggtggtgcgcacctcgcgctcgaaagcccctgggatttcttcctcaatctcttcttcttccactaacatctcttcctcttcaggtggggctgcaggaggagggggaacgcggcgacgccggcggcgcacgggcagacggtcgatgaatctttcaatgacctctccgcggcggcggcgcatggtttcagtgacggcgcggccgttctcgcgcggtcgcagagtaaaaacaccgccgcgcatctccttaaagtggtgactgggaggttctccgtttgggagggagagggcgctgattatacattttattaattggcccgtagggactgcacgcagagatctgatcgtgtcaagatccacgggatctgaaaacctttcgacgaaagcgtctaaccagtcacagtcacaaggtaggctgagtacggcttcttgtgggcgggggtggttatgtgttcggtctgggtcttctgtttcttcttcatctcgggaaggtgagacgatgctgctggtgatgaaattaaagtaggcagttctaagacggcggatggtggcgaggagcaccaggtctttgggtccggcttgctggatacgcaggcgattggccattccccaagcattatcctgacatctagcaagatctttgtagtagtcttgcatgagccgttctacgggcacttcttcctcacccgttctgccatgcatacgtgtgagtccaaatccgcgcattggttgtaccagtgccaagtcagctacgactctttcggcgaggatggcttgctgtacttgggtaagggtggcttgaaagtcatcaaaatccacaaagcggtggtaagctcctgtattaatggtgtaagcacagttggccatgactgaccagttaactgtctggtgaccagggcgcacgagctcggtgtatttaaggcgcgaataggcgcgggtgtcaaagatgtaatcgttgcaggtgcgcaccagatactggtaccctataagaaaatgcggcggtggttggcggtagagaggccatcgttctgtagctggagcgccaggggcgaggtcttccaacataaggcggtgatagccgtagatgtacctggacatccaggtgattcctgcggcggtagtagaagcccgaggaaactcgcgtacgcggttccaaatgttgcgtagcggcatgaagtagttcattgtaggcacggtttgaccagtgaggcgcgcgcagtcattgatgctctatagacacggagaaaatgaaagcgttcagcgactcgactccgtagcctggaggaacgtgaacgggttgggtcgcggtgtaccccggttcgagacttgtactcgagccggccggagccgcggctaacgtggtattggcactcccgtctcgacccagcctacaaaaatccaggatacggaatcgagtcgttttgctggtttccgaatggcagggaagtgagtcctattttttttttttgccgctcagatgcatcccgtgctgcgacagatgcgcccccaacaacagcccccctcgcagcagcagcagcagcaatcacaaaaggctgtccctgcaactactgcaactgccgccgtgagcggtgcgggacagcccgcctatgatctggacttggaagagggcgaaggactggcacgtctaggtgcgccttcacccgagcggcatccgcgagttcaactgaaaaaagattctcgcgaggcgtatgtgccccaacagaacctatttagagacagaagcggcgaggagccggaggagatgcgagcttcccgctttaacgcgggtcgtgagctgcgtcacggtttggaccgaagacgagtgttgcgggacgaggatttcgaagttgatgaaatgacagggatcagtcctgccagggcacacgtggctgcagccaaccttgtatcggcttacgagcagacagtaaaggaagagcgtaacttccaaaagtcttttaataatcatgtgcgaaccctgattgcccgcgaagaagttacccttggtttgatgcatttgtgggatttgatggaagctatcattcagaaccctactagcaaacctctgaccgcccagctgtttctggtggtgcaacacagcagagacaatgaggctttcagagaggcgctgctgaacatcaccgaacccgaggggagatggttgtatgatcttatcaacattctacagagtatcatagtgcaggagcggagcctgggcctggccgagaaggtggctgccatcaattactcggttttgagcttgggaaaatattacgctcgcaaaatctacaagactccatacgttcccatagacaaggaggtgaagatagatgggttctacatgcgcatgacgctcaaggtcttgaccctgagcgatgatcttggggtgtatcgcaatgacagaatgcatcgcgcggttagcgccagcaggaggcgcgagttaagcgacagggaactgatgcacagtttgcaaagagctctgactggagctggaaccgagggtgagaattacttcgacatgggagctgacttgcagtggcagcctagtcgcagggctctgagcgccgcgacggcaggatgtgagcttccttacatagaagaggcggatgaaggcgaggaggaagagggcgagtacttggaagactgatggcacaacccgtgttttttgctagatggaacagcaagcaccggatcccgcaatgcgggcggcgctgcagagccagccgtccggcattaactcctcggacgattggacccaggccatgcaacgtatcatggcgttgacgactcgcaaccccgaagcctttagacagcaaccccaggccaaccgtctatcggccatcatggaagctgtagtgccttcccgctctaatcccactcatgagaaggtcctggccatcgtgaacgcgttggtggagaacaaagctattcgtccagatgaggccggactggtatacaacgctctcttagaacgcgtggctcgctacaacagtagcaatgtgcaaaccaatttggaccgtatgataacagatgtacgcgaagccgtgtctcagcgcgaaaggttccagcgtgatgccaacctgggttcgctggtggcgttaaatgctttcttgagtactcagcctgctaatgtgccgcgtggtcaacaggattatactaactttttaagtgctttgagactgatggtatcagaagtacctcagagcgaagtgtatcagtccggtcctgattacttctttcagactagcagacagggcttgcagacggtaaatctgagccaagcttttaaaaaccttaaaggtttgtggggagtgcatgccccggtaggagaaagagcaaccgtgtctagcttgttaactccgaactcccgcctattattactgttggtagctcctttcaccgacagcggtagcatcgaccgtaattcctatttgggttacctactaaacctgtatcgcgaagccatagggcaaagtcaggtggacgagcagacctatcaagaaattacccaagtcagtcgcgctttgggacaggaagacactggcagtttggaagccactctgaacttcttgcttaccaatcggtctcaaaagatccctcctcaatatgctcttactgcggaggaggagaggatccttagatatgtgcagcagagcgtgggattgtttctgatgcaagagggggcaactccgactgcagcactggacatgacagcgcgaaatatggagcccagcatgtatgccagtaaccgacctttcattaacaaactgctggactacttgcacagagctgccgctatgaactctgattatttcaccaatgccatcttaaacccgcactggctgcccccacctggtttctacacgggcgaatatgacatgcccgaccctaatgacggatttctgtgggacgacgtggacagcgatgttttttcacctctttctgatcatcgcacgtggaaaaaggaaggcggcgatagaatgcattcttctgcatcgctgtccggggtcatgggtgctaccgcggctgagcccgagtctgcaagtccttttcctagtctacccttttctctacacagtgtacgtagcagcgaagtgggtagaataagtcgcccgagtttaatgggcgaagaggagtatctaaacgattccttgctcagaccggcaagagaaaaaaatttcccaaacaatggaatagaaagtttggtggataaaatgagtagatggaagacttatgctcaggatcacagagacgagcctgggatcatggggattacaagtagagcgagccgtagacgccagcgccatgacagacagaggggtcttgtgtgggacgatgaggattcggccgatgatagcagcgtgctggacttgggtgggagaggaaggggcaacccgtttgctcatttgcgccctcgcttgggtggtatgttgtaaaaaaaaataaaaaaaaaactcaccaaggccatggcgacgagcgtacgttcgttcttctttattatctgtgtctagtataatgaggcgagtcgtgctaggcggagcggtggtgtatccggagggtcctcctccttcgtacgagagcgtgatgcagcagcagcaggcgacggcggtgatgcaatccccactggaggctccctttgtgcctccgcgatacctggcacctacggagggcagaaacagcattcgttattcggaactggcacctcagtacgataccaccaggttgtatctggtggacaacaagtcggcggacattgcttctctgaactatcagaatgaccacagcaacttcttgaccacggtggtgcaaaacaatgactttacccctacggaagccagcacccagaccattaactttgatgaacgatcgcggtggggcggtcagctaaagaccatcatgcatactaacatgccaaacgtgaacgagtatatgtttagtaacaagttcaaagcgcgtgtgatggtgtccagaaaacctcccgacggtgctgcagttggggatacttatgatcacaagcaggatattttgaaatatgagtggttcgagtttactttgccagaaggcaacttttcagttactatgactattgatttgatgaacaatgccatcatagataattacttgaaagtgggtagacagaatggagtgcttgaaagtgacattggtgttaagttcgacaccaggaacttcaagctgggatgggatcccgaaaccaagttgatcatgcctggagtgtatacgtatgaagccttccatcctgacattgtcttactgcctggctgcggagtggattttaccgagagtcgtttgagcaaccttcttggtatcagaaaaaaacagccatttcaagagggttttaagattttgtatgaagatttagaaggtggtaatattccggccctcttggatgtagatgcctatgagaacagtaagaaagaacaaaaagccaaaatagaagctgctacagctgctgcagaagctaaggcaaacatagttgccagcgactctacaagggttgctaacgctggagaggtcagaggagacaattttgcgccaacacctgttccgactgcagaatcattattggccgatgtgtctgaaggaacggacgtgaaactcactattcaacctgtagaaaaagatagtaagaatagaagctataatgtgttggaagacaaaatcaacacagcctatcgcagttggtatctttcgtacaattatggcgatcccgaaaaaggagtgcgttcctggacattgctcaccacctcagatgtcacctgcggagcagagcaggtctactggtcgcttccagacatgatgaaggatcctgtcactttccgctccactagacaagtcagtaactaccctgtggtgggtgcagagcttatgcccgtcttctcaaagagcttctacaacgaacaagctgtgtactcccagcagctccgccagtccacctcgcttacgcacgtcttcaaccgctttcctgagaaccagattttaatccgtccgccggcgcccaccattaccaccgtcagtgaaaacgttcctgctctcacagatcacgggaccctgccgttgcgcagcagtatccggggagtccaacgtgtgaccgttactgacgccagacgccgcacctgtccctacgtgtacaaggcactgggcatagtcgcaccgcgcgtcctttcaagccgcactttctaaaaaaaaaaaaaatgtccattcttatctcgcccagtaataacaccggttggggtctgcgcgctccaagcaagatgtacggaggcgcacgcaaacgttctacccaacatcctgtccgtgttcgcggacattttcgcgctccatggggcgccctcaagggccgcactcgcgttcgaaccaccgtcgatgatgtaatcgatcaggtggttgccgacgcccgtaattatactcctactgcgcctacatctactgtggatgcagttattgacagtgtagtggctgacgctcgcaactatgctcgacgtaagagccggcgaaggcgcattgccagacgccaccgagctaccactgccatgcgagccgcaagagctctgctacgaagagctagacgcgtggggcgaagagccatgcttagggcggccagacgtgcagcttcgggcgccagcgccggcaggtcccgcaggcaagcagccgctgtcgcagcggcgactattgccgacatggcccaatcgcgaagaggcaatgtatactgggtgcgtgacgctgccaccggtcaacgtgtacccgtgcgcacccgtccccctcgcacttagaagatactgagcagtctccgatgttgtgtcccagcggcgaggatgtccaagcgcaaatacaaggaagaaatgctgcaggttatcgcacctgaagtctacggccaaccgttgaaggatgaaaaaaaaccccgcaaaatcaagcgggttaaaaaggacaaaaaagaagaggaagatggcgatgatgggctggcggagtttgtgcgcgagtttgccccacggcgacgcgtgcaatggcgtgggcgcaaagttcgacatgtgttgagacctggaacttcggtggtctttacacccggcgagcgttcaagcgctacttttaagcgttcctatgatgaggtgtacggggatgatgatattcttgagcaggcggctgaccgattaggcgagtttgcttatggcaagcgtagtagaataacttccaaggatgagacagtgtcgatacccttggatcatggaaatcccacccctagtcttaaaccggtcactttgcagcaagtgttacccgtaactccgcgaacaggtgttaaacgcgaaggtgaagatttgtatcccactatgcaactgatggtacccaaacgccagaagttggaggacgttttggagaaagtaaaagtggatccagatattcaacctgaggttaaagtgagacccattaagcaggtagcgcctggtctgggggtacaaactgtagacattaagattcccactgaaagtatggaagtgcaaactgaacccgcaaagcctactgccacctccactgaagtgcaaacggatccatggatgcccatgcctattacaactgacgccgccggtcccactcgaagatcccgacgaaagtacggtccagcaagtctgttgatgcccaattatgttgtacacccatctattattcctactcctggttaccgaggcactcgctactatcgcagccgaaacagtacctcccgccgtcgccgcaagacacctgcaaatcgcagtcgtcgccgtagacgcacaagcaaaccgactcccggcgccctggtgcggcaagtgtaccgcaatggtagtgcggaacctttgacactgccgcgtgcgcgttaccatccgagtatcatcacttaatcaatgttgccgctgcctccttgcagatatggccctcacttgtcgccttcgcgttcccatcactggttaccgaggaagaaactcgcgccgtagaagagggatgttgggacgcggaatgcgacgctacaggcgacggcgtgctatccgcaagcaattgcggggtggttttttaccagccttaattccaattatcgctgctgcaattggcgcgataccaggcatagcttccgtggcggttcaggcctcgcaacgacattgacattggaaaaaaacgtataaataaaaaaaaaaaaatacaatggactctgacactcctggtcctgtgactatgttttcttagagatggaagacatcaatttttcatccttggctccgcgacacggcacgaagccgtacatgggcacctggagcgacatcggcacgagccaactgaacgggggcgccttcaattggagcagtatctggagcgggcttaaaaattttggctcaaccataaaaacatacgggaacaaagcttggaacagcagtacaggacaggcgcttagaaataaacttaaagaccagaacttccaacaaaaagtagtcgatgggatagcttccggcatcaatggagtggtagatttggctaaccaggctgtgcagaaaaagataaacagtcgtttggacccgccgccagcaaccccaggtgaaatgcaagtggaggaagaaattcctccgccagaaaaacgaggcgacaagcgtccgcgtcccgatttggaagagacgctggtgacgcgcgtagatgaaccgccttcttatgaggaagcaacgaagcttggaatgcccaccactagaccgatagccccaatggccaccggggtgatgaaaccttctcagttgcatcgacccgtcaccttggatttgccccctccccctgctgctactgctgtacccgcttctaagcctgtcgctgccccgaaaccagtcgccgtagccaggtcacgtcccgggggcgctcctcgtccaaatgcgcactggcaaaatactctgaacagcatcgtgggtctaggcgtgcaaagtgtaaaacgccgtcgctgcttttaattaaatatggagtagcgcttaacttgcctatctgtgtatatgtgtcattacacgccgtcacagcagcagaggaaaaaaggaagaggtcgtgcgtcgacgctgagttactttcaagatggccaccccatcgatgctgccccaatgggcatacatgcacatcgccggacaggatgcttcggagtacctgagtccgggtctggtgcagttcgcccgcgccacagacacctacttcaatctgggaaataagtttagaaatcccaccgtagcgccgacccacgatgtgaccaccgaccgtagccagcggctcatgttgcgcttcgtgcccgttgaccgggaggacaatacatactcttacaaagtgcggtacaccctggccgtgggcgacaacagagtgctggatatggccagcacgttctttgacattaggggtgtgttggacagaggtcccagtttcaaaccctattctggtacggcttacaactccctggctcctaaaggcgctccaaatacatctcagtggattgcagaaggtgtaaaaaatacaactggtgaggaacacgtaacagaagaggaaaccaatactactacttacacttttggcaatgctcctgtaaaagctgaagctgaaattacaaaagaaggactcccagtaggtttggaagtttcagatgaagaaagtaaaccgatttatgctgataaaacatatcagccagaacctcagctgggagatgaaacttggactgaccttgatggaaaaaccgaaaagtatggaggcagggctctcaaacccgatactaagatgaaaccatgctacgggtcctttgccaaacctactaatgtgaaaggcggtcaggcaaaacaaaaaacaacggagcagccaaatcagaaagtcgaatatgatatcgacatggagttttttgatgcggcatcgcagaaaacaaacttaagtcctaaaattgtcatgtatgcagaaaatgtaaatttggaaactccagacactcatgtagtgtacaaacctggaacagaagacacaagttccgaagctaatttgggacaacaatctatgcccaacagacccaactacattggcttcagagataactttattggacttatgtactataacagtactggtaacatgggggtgctggctggtcaagcgtctcagttaaatgcagtggttgacttgcaggacagaaacacagaactttcttaccaactcttgcttgactctctgggcgacagaaccagatactttagcatgtggaatcaggctgtggacagttatgatcctgatgtacgtgttattgaaaatcatggtgtggaagatgaacttcccaactactgttttccactggacggcataggtgttccaacaaccagttacaaatcaatagttccaaatggagacaatgcgcctaattggaaggaacctgaagtaaatggaacaagtgagatcggacagggtaatttgtttgccatggaaattaaccttcaagccaatctatggcgaagtttcctttattccaatgtggctctatatctcccagactcgtacaaatacaccccgtccaatgtcactcttccagaaaacaaaaacacctacgactacatgaacgggcgggtggtgccgccatctctagtagacacctatgtgaacattggtgccaggtggtctctggatgccatggacaatgtcaacccattcaaccaccaccgtaacgctggcttgcgttaccgatccatgcttctgggtaacggacgttatgtgcctttccacatacaagtgcctcaaaaattcttcgctgttaaaaacctgctgcttctcccaggctcctacacttatgagtggaactttaggaaggatgtgaacatggttctacagagttccctcggtaacgacctgcgggtagatggcgccagcatcagtttcacgagcatcaacctctatgctacttttttccccatggctcacaacaccgcttccacccttgaagccatgctgcggaatgacaccaatgatcagtcattcaacgactacctatctgcagctaacatgctctaccccattcctgccaatgcaaccaatattcccatttccattccttctcgcaactgggcggctttcagaggctggtcatttaccagactgaaaaccaaagaaactccctctttggggtctggatttgacccctactttgtctattctggttctattccctacctggatggtaccttctacctgaaccacacttttaagaaggtttccatcatgtttgactcttcagtgagctggcctggaaatgacaggttactatctcctaacgaatttgaaataaagcgcactgtggatggcgaaggctacaacgtagcccaatgcaacatgaccaaagactggttcttggtacagatgctcgccaactacaacatcggctatcagggcttctacattccagaaggatacaaagatcgcatgtattcatttttcagaaacttccagcccatgagcaggcaggtggttgatgaggtcaattacaaagacttcaaggccgtcgccataccctaccaacacaacaactctggctttgtgggttacatggctccgaccatgcgccaaggtcaaccctatcccgctaactatccctatccactcattggaacaactgccgtaaatagtgttacgcagaaaaagttcttgtgtgacagaaccatgtggcgcataccgttctcgagcaacttcatgtctatgggggcccttacagacttgggacagaatatgctctatgccaactcagctcatgctctggacatgacctttgaggtggatcccatggatgagcccaccctgctttatcttctcttcgaagttttcgacgtggtcagagtgcatcagccacaccgcggcatcatcgaggcagtctacctgcgtacaccgttctcggccggtaacgctaccacgtaagaagcttcttgcttcttgcaaatagcagctgcaaccatggcctgcggatcccaaaacggctccagcgagcaagagctcagagccattgtccaagacctgggttgcggaccctattttttgggaacctacgataagcgcttcccggggttcatggcccccgataagctcgcctgtgccattgtaaatacggccggacgtgagacggggggagagcactggttggctttcggttggaacccacgttctaacacctgctacctttttgatccttttggattctcggatgatcgtctcaaacagatttaccagtttgaatatgagggtctcctgcgccgcagcgctcttgctaccaaggaccgctgtattacgctggaaaaatctacccagaccgtgcagggtccccgttctgccgcctgcggacttttctgctgcatgttccttcacgcctttgtgcactggcctgaccgtcccatggacggaaaccccaccatgaaattgctaactggagtgccaaacaacatgcttcattctcctaaagtccagcccaccctgtgtgacaatcaaaaagcactctaccattttcttaatacccattcgccttattttcgctcccatcgtacacacatcgaaagggccactgcgttcgaccgtatggatgttcaataatgactcatgtaaacaacgtgttcaataaacatcactttatttttttacatgtatcaaggctctgcattacttatttatttacaagtcgaatgggttctgacgagaatcagaatgacccgcaggcagtgatacgttgcggaactgatacttgggttgccacttgaattcgggaatcaccaacttgggaaccggtatatcgggcaggatgtcactccacagctttctggtcagctgcaaagctccaagcaggtcaggagccgaaatcttgaaatcacaattaggaccagtgctttgagcgcgagagttgcggtacaccggattgcagcactgaaacaccatcagcgacggatgtctcacgcttgccagcacggtgggatctgcaatcatgcccacatccagatcttcagcattggcaatgctgaacggggtcatcttgcaggtctgcctacccatggcgggcacccaattaggcttgtggttgcaatcgcagtgcagggggatcagtatcatcttggcctgatcctgtctgattcctggatacacggctctcatgaaagcatcatattgcttgaaagcctgctgggctttactaccctcggtataaaacatcccgcaggacctgctcgaaaactggttagctgcacagccggcatcattcacacagcagcgggcgtcattgttagctatttgcaccacacttctgccccagcggttttgggtgattttggttcgctcgggattctcctttaaggctcgttgtccgttctcgctggccacatccatctcgataatctgctccttctgaatcataatattgccatgcaggcacttcagcttgccctcataatcattgcagccatgaggccacaacgcacagcctgtacattcccaattatggtgggcgatctgagaaaaagaatgtatcattccctgcagaaatcttcccatcatcgtgctcagtgtcttgtgactagtgaaagttaactggatgcctcggtgctcctcgtttacgtactggtgacagatgcgcttgtattgttcgtgttgctcaggcattagtttaaaagaggttctaagttcgttatccagcctgtacttctccatcagcagacacatcacttccatgcctttctcccaagcagacaccaggggcaagctaatcggattcttaacagtgcaggcagcagctcctttagccagagggtcatctttagcgatcttctcaatgcttcttttgccatccttctcaacgatgcgcacgggcgggtagctgaaacccactgctacaagttgcgcctcttctctttcttcttcgctgtcttgactgatgtcttgcatggggatatgtttggtcttccttggcttctttttggggggtatcggaggaggaggactgtcgctccgttccggagacagggaggattgtgacgtttcgctcaccattaccaactgactgtcggtagaagaacctgaccccacacggcgacaggtgtttctcttcgggggcagaggtggaggcgattgcgaagggctgcggtccgacctggaaggcggatgactggcagaaccccttccgcgttcgggggtgtgctccctgtggcggtcgcttaactgatttccttcgcggctggccattgtgttctcctaggcagagaaacaacagacatggaaactcagccattgctgtcaacatcgccacgagtgccatcacatctcgtcctcagcgacgaggaaaaggagcagagcttaagcattccaccgcccagtcctgccaccacctctaccctagaagataaggaggtcgacgcatctcatgacatgcagaataaaaaagcgaaagagtctgagacagacatcgagcaagacccgggctatgtgacaccggtggaacacgaggaagagttgaaacgctttctagagagagaggatgaaaactgcccaaaacaacgagcagataactatcaccaagatgctggaaatagggatcagaacaccgactacctcatagggcttgacggggaagacgcgctccttaaacatctagcaagacagtcgctcatagtcaaggatgcattattggacagaactgaagtgcccatcagtgtggaagagctcagccgcgcctacgagcttaacctcttttcacctcgtactccccccaaacgtcagccaaacggcacctgcgagccaaatcctcgcttaaacttttatccagcttttgctgtgccagaagtactggctacctatcacatcttttttaaaaatcaaaaaattccagtctcctgccgcgctaatcgcacccgcgccgatgccctactcaatctgggacctggttcacgcttacctgatatagcttccttggaagaggttccaaagatcttcgagggtctgggcaataatgagactcgggccgcaaatgctctgcaaaagggagaaaatggcatggatgagcatcacagcgttctggtggaattggaaggcgataatgccagactcgcagtactcaagcgaagcatcgaggtcacacacttcgcatatcccgctgtcaacctgccccctaaagtcatgacggcggtcatggaccagttactcattaagcgcgcaagtcccctttcagaagacatgcatgacccagatgcctgtgatgagggtaaaccagtggtcagtgatgagcagctaacccgatggctgggcaccgactctcccagggatttggaagagcgtcgcaagcttatgatggccgtggtgctggttaccgtagaactagagtgtctccgacgtttctttaccgattcagaaaccttgcgcaaactcgaagagaatctgcactacacttttagacacggctttgtgcggcaggcatgcaagatatctaacgtggaactcaccaacctggtttcctacatgggtattctgcatgagaatcgcctaggacaaagcgtgctgcacagcaccctgaagggggaagcccgccgtgattacatccgcgattgtgtctatctgtacctgtgccacacgtggcaaaccggcatgggtgtatggcagcaatgtttagaagaacagaacttgaaagagcttgacaagctcttacagaaatctcttaaggttctgtggacagggttcgacgagcgcaccgtcgcttccgacctggcagacctcatcttcccagagcgtctcagggttactttgcgaaacggattgcctgactttatgagccagagcatgcttaacaattttcgctctttcatcctggaacgctccggtatcctgcccgccacctgctgcgcactgccctccgactttgtgcctctcacctaccgcgagtgccccccgccgctatggagtcactgctacctgttccgtctggccaactatctctcctaccactcggatgtgatcgaggatgtgagcggagacggcttgctggagtgtcactgccgctgcaatctgtgcacgccccaccggtccctagcttgcaacccccagttgatgagcgaaacccagataataggcacctttgaattgcaaggccccagcagccaaggcgatgggtcttctcctgggcaaagtttaaaactgaccccgggactgtggacctccgcctacttgcgcaagtttgctccggaagattaccacccctatgaaatcaagttctatgaggaccaatcacagcctccaaaggccgaactttcggcctgcgtcatcacccagggggcaattctggcccaattgcaagccatccaaaaatcccgccaagaatttctactgaaaaagggtaagggggtctaccttgacccccagaccggcgaggaactcaacacaaggttccctcaggatgtcccaacgacgagaaaacaagaagttgaaggtgcagccgccgcccccagaagatatggaggaagattgggacagtcaggcagaggaggcggaggaggacagtctggaggacagtctggaggaagacagtttggaggaggaaaacgaggaggcagaggaggtggaagaagtaaccgccgacaaacagttatcctcggctgcggagacaagcaacagcgctaccatctccgctccgagtcgaggaacccggcggcgtcccagcagtagatgggacgagaccggacgcttcccgaacccaaccagcgcttccaagaccggtaagaaggatcggcagggatacaagtcctggcgggggcataagaatgccatcatctcctgcttgcatgagtgcgggggcaacatatccttcacgcggcgctacttgctattccaccatggggtgaactttccgcgcaatgttttgcattactaccgtcacctccacagcccctactatagccagcaaatcccggcagtctcgacagataaagacagcggcggcgacctccaacagaaaaccagcagcggcagttagaaaatacacaacaagtgcagcaacaggaggattaaagattacagccaacgagccagcgcaaacccgagagttaagaaatcggatctttccaaccctgtatgccatcttccagcagagtcggggtcaagagcaggaactgaaaataaaaaaccgatctctgcgttcgctcaccagaagttgtttgtatcacaagagcgaagatcaacttcagcgcactctcgaggacgccgaggctctcttcaacaagtactgcgcgctgactcttaaagagtaggcagcgaccgcgcttattcaaaaaaggcgggaattacatcatcctcgacatgagtaaagaaattcccacgccttacatgtggagttatcaaccccaaatgggattggcggcaggcgcctcccaggactactccacccgcatgaattggctcagcgccgggccttctatgatttctcgagttaatgatatacgcgcctaccgaaaccaaatacttttggaacagtcagctcttaccaccacgccccgccaacaccttaatcccagaaattggcccgccgccctagtgtaccaggaaagtcccgctcccaccactgtattacttcctcgagacgcccaggccgaagtccaaatgactaatgcaggtgcgcagttagctggcggctccaccctatgtcgtcacaggcctcggcataatataaaacgcctgatgatcagaggccgaggtatccagctcaacgacgagtcggtgagctctccgcttggtctacgaccagacggaatctttcagattgccggctgcgggagatcttccttcacccctcgtcaggctgttctgactttggaaagttcgtcttcgcaaccccgctcgggcggaatcgggaccgttcaatttgtggaggagtttactccctctgtctacttcaaccccttctccggatctcctgggcattacccggacgagttcataccgaacttcgacgcgattagcgagtcagtggacggctacgattgatgtctggtgacgcggctgagctatctcggctgcgacatctagaccactgccgccgctttcgctgctttgcccgggaactcattgagttcatctacttcgaactccccaaggatcaccctcaaggtccggcccacggagtgcggatttctatcgaaggcaaaatagactctcgcctgcaacgaattttctcccagcggcccgtgctgatcgagcgagaccagggaaacaccacggtttccatctactgcatttgtaatcaccccggattgcatgaaagcctttgctgtcttatgtgtactgagtttaataaaaactgaattaagactctcctacggactgccgcttcttcaacccggattttacaaccagaagaacgaaacttttcctgtcgtccaggactctgttaacttcacctttcctactcacaaactagaagctcaacgactacaccgcttttccagaagcattttccctactaatactactttcaaaaccggaggtgagctccaaggtcttcctacagaaaacccttgggtggaagcgggccttgtagtgctaggaattcttgcgggtgggcttgtgattattctttgctacctatacacaccttgcttcactttcttagtggtgttgtggtattggtttaaaaaatggggcccatactagtcttgcttgttttactttcgcttttggaaccgggttctgccaattacgatccatgtctagacttcgacccagaaaactgcacacttacttttgcacccgacacaagccgcatctgtggagttcatcgcctctcttacgaacttggcccccaacgacaaaaatttacctgcatggtgggaatcaaccccatagttatcacccagcaaagtggagatactaagggttgcattcactgctcctgcgattccatcgagtgcacctacaccctgctgaagaccctatgcggcctaagagacctgctaccaatgaattaaaaaatgattaataaaaaatcacttactgcggccgctatggccggcctgaaatcagcaataaggtctctgttgaaattttctcccagcagcacctcacttccctcttcccaactctggtattctaaaccccgttcagcggcatactttctccatactttaaaggggatgtcaaattttagctcctctcctgtacccacaatcttcatgtctttcttcccagatgaccaagagagtccggctcagtgactccttcaaccctgtctacccctatgaagatgaaagcacctcccaacacccctttataaacccagggtttatttccccaaatggcttcacacaaagcccaaacggagttcttactttaaaatgtttaaccccactaacaaccacaggcggatctctacagctaaaagtgggagggggacttacagtggatgacaccaacggttttttgaaagaaaacataagtgccaccacaccactcgttaagactggtcactctataggtttaccactaggagccggattgggaacgaatgaaaataaactttgtatcaaattaggacaaggacttacattcaattcaaacaacatttgcattgatgacaatattaacaccttatggacaggagtcaaccccaccgaagccaactgtcaaatcatgaactccagtgaatctaatgattgcaaattaattctaacactagttaaaactggagcactagtcactgcatttgtttatgttataggagtatctaacaattttaatatgctaactacacacagaaatataaattttactgcagagctgtttttcgattctactggtaatttactaactagactctcatccctcaaaactccacttaatcataaatcaggacaaaacatggctactggtgccattactaatgctaaaggtttcatgcccagcacgactgcctatcctttcaatgataattctagagaaaaagaaaactacatttacggaacttgttactacacagctagtgatcgcactgcttttcccattgacatatctgtcatgcttaaccgaagagcaataaatgacgagacatcatattgtattcgtataacttggtcctggaacacaggagatgccccagaggtgcaaacctctgctacaaccctagtcacctccccatttaccttttactacatcagagaagacgactgacaaataaagtttgcgatcgctaccctgcaggaacttgtttatttgaaaatcaattcacaaaatccgagtagttattttgcctcccccttcccatttaacagaatacaccaatctctccccacgcacagctttaaacatttggataccattagatatagacatggttttagattccacattccaaacagtttcagagcgagccaatctggggtcagtgatagataaaaatccatcgggatagtcttttaaagcgctttcacagtccaactgctgcggatgcgactccggagtctggatcacggtcatctggaagaagaacgatgggaatcataatccgaaaacggtatcggacgattgtgtctcatcaaacccacaagcagccgctgtctgcgtcgctccgtgcgactgctgtttatgggatcagggtccacagtgtcctgaagcatgattttaatagcccttaacatcaactttctggtgcgatgcgcgcagcaacgcattctgatttcactcaaatctttgcagtaggtacaacacattattacaatattgtttaataaaccataattaaaagcgctccagccaaaactcatatctgatataatcgcccctgcatgaccatcataccaaagtttaatataaattaaatgacgttccctcaaaaacacactacccacatacatgatctcttttggcatgtgcatattaacaatctgtctgtaccatggacaacgttggttaatcatgcaacccaatataaccttccggaaccacactgccaacaccgctcccccagccatgcattgaagtgaaccctgctgattacaatgacaatgaagaacccaattctctcgaccgtgaatcacttgagaatgaaaaatatctatagtggcacaacatagacataaatgcatgcatcttctcataatttttaactcctcaggatttagaaacatatcccagggaataggaagctcttgcagaacagtaaagctggcagaacaaggaagaccacgaacacaacttacactatgcatagtcatagtatcacaatctggcaacagcgggtggtcttcagtcatagaagctcgggtttcattttcctcacaacgtggtaactgggctctggtgtaagggtgatgtctggcgcatgatgtcgagcgtgcgcgcaaccttgtcataatggagttgcttcctgacattctcgtattttgtatagcaaaacgcggccctggcagaacacactcttcttcgccttctatcctgccgcttagcgtgttccgtgtgatagttcaagtacaaccacactcttaagttggtcaaaagaatgctggcttcagttgtaatcaaaactccatcgcatctaatcgttctgaggaaatcatccaagcaatgcaactggattgtgtttcaagcaggagaggagagggaagagacggaagaaccatgttaatttttattccaaacgatctcgcagtacttcaaattgtagatcgcgcagatggcatctctcgcccccactgtgttggtgaaaaagcacagctagatcaaaagaaatgcgattttcaaggtgctcaacggtggcttccagcaaagcctccacgcgcacatccaagaacaaaagaataccaaaagaaggagcattttctaactcctcaatcatcatattacattcctgcaccattcccagataattttcagctttccagccttgaattattcgtgtcagttcttgtggtaaatccaatccacacattacaaacaggtcccggagggcgccctccaccaccattcttaaacacaccctcataatgacaaaatatcttgctcctgtgtcacctgtagcgaattgagaatggcaacatcaattgacatgcccttggctctaagttcttctttaagttctagttgtaaaaactctctcatattatcaccaaactgcttagccagaagccccccgggaacaagagcaggggacgctacagtgcagtacaagcgcagacctccccaattggctccagcaaaaacaagattggaataagcatattgggaaccgccagtaatatcatcgaagttgctggaaatataatcaggcagagtttcttgtaaaaattgaataaaagaaaaatttgccaaaaaaacattcaaaacctctgggatgcaaatgcaataggttaccgcgctgcgctccaacattgttagttttgaattagtctgcaaaaataaaaaaaaaaacaagcgtcatatcatagtagcctgacgaacagatggataaatcagtctttccatcacaagacaagccacagggtctccagctcgaccctcgtaaaacctgtcatcatgattaaacaacagcaccgaaagttcctcgcggtgaccagcatgaataattcttgatgaagcatacaatccagacatgttagcatcagttaacgagaaaaaacagccaacatagcctttgggtataattatgcttaatcgtaagtatagcaaagccacccctcgcggatacaaagtaaaaggcacaggagaataaaaaatataattatttctctgctgctgttcaggcaacgtcgcccccggtccctctaaatacacatacaaagcctcatcagccatggcttaccagacaaagtacagcgggcacacaaagcacaagctctaaagtgactctccaacctctccacaatatatatatacacaagccctaaactgacgtaatgggagtaaagtgtaaaaaatcccgccaaacccaacacacaccccgaaactgcgtcaccagggaaaagtacagtttcacttccgcaatcccaacaggcgtaacttcctctttctcacggtacgtgatatcccactaacttgcaacgtcattttcccacggtcgcaccgccccttttagccgttaaccccacagccaatcaccacacgatccacactttttaaaatcacctcatttacatattggcaccattccatctataaggtatattatatagatagaggcgcgccctctcttaaggtagcatcgggatcgagtccctgagagaacatcctcaatcccgatctatccttagatccgaggaatatcgaaatcagttacgctagggataacagggtaatatagcatcccctcggattgctatctaccggctcgtcagctatgatctctcgatttcgatcaagaaatctcattggttaccttgggctatcgaaaccagtcaagtcagctacttggcgagatcgacttgtctgagtttcgactacgctcagaattgcgtcagcgcctatcgccaggtattactccaatcccgaatatccgagcctgagagaacatcctcaatcccgatctatccttagatccgaggaatatcgaaatcgtttaaatcttttcttgatggtaaatcattcgaatataagaatggagagacgaatggggaaacgacaaagatgacattctttggtccttctggtgaggttctcaagtttttggttaatcctgtcaacaacttatatcgtatggggctgacttcaggtgctacatttgaagagataaattgcactgaaatctagtaatattttatctgattaataagatgatcttcttgagatcgttttggtctgcgcgtaatctcttgctctgaaaacgaaaaaaccgccttgcagggcggtttttcgaaggttctctgagctaccaactctttgaaccgaggtaactggcttggcagagcgcagtcaccaaaacttgtcctttcagtttagccttaaccggcgcatgacttcaagactaactctgctaaatcaattaccagtggctgctgccagtggtgcttttgcatgtctttccgggttggactcaagacgatagttaccggataaggcgcagcggtcggactgaacggggggttcgtgcatacagtccagcttggagcgaactgcctacccggaactgagtgtcaggcgtggaatgagacaaacgcggccataacagcggaatgacaccggtaaaccgaaaggcaggaacaggagagcgcacgagggagccgccagggggaaacgcctggtatctttatagtcctgtcgggtttcgccaccactgatttgagcgtcagatttcgtgatgcttgtcaggggggcggagcctatggaaaaacggctttgccgcggccctctcacttccctgttaagtatcttcctggcatcttccaggaaatctccgccccgttcgtaagccatttccgctcgccgcagtcgaacgaccgagcgtagcgagtcagtgagcgaggaagcggaatatatcctgtatcacatattctgctgacgcaccggtgcggccttttttctcctgccacatgaagcacttcactgacaccctcatcagtgccaacatagtaagccagtatacactccgctaatttaaacgtggtgtaccgagaacgatcctctcagtgcgatctcgacgatcagtggtattccgacatatcgttgcttggcagtcagccagtcgatcctagcttgggacccaggaagtccaatcgtcagatattgtactcagcctggtcacggcagcgtaccgatctcgtaactataacggtcctaaggtagcgaactagatattgatagtctgatcggtcaacgtataatcgagtcctagcttttgcaaacatctatcaagagacaggatcagcaggaggctttcgcatgattgaacaagatggattgcacgcaggttctccggcggcttgggtggagaggctattcggctatgactgggcacaacagacaatcggctgctctgatgccgccgtgttccggctgtcagcgcaggggcgtccggttctttttgtcaagaccgacctgtccggtgccctgaatgaactgcaagacgaggcagcgcggctatcgtggctggcgacgacgggcgttccttgcgcggctgtgctcgacgttgtcactgaagcgggaagggactggctgctattgggcgaagtgccggggcaggatctcctgtcatctcaccttgctcctgccgagaaagtatccatcatggctgatgcaatgcggcggctgcatacgcttgatccggctacctgcccattcgaccaccaagcgaaacatcgcatcgagcgagcacgtactcggatggaagccggtcttgtcgatcaggatgatctggacgaagagcatcaggggctcgcgccagccgaactgttcgccaggctcaaggcgtctatgcccgacggcgaggatctcgtcgtgacccacggcgatgcctgcttgccgaatatcatggtggaaaatggccgcttttctggattcatcgactgtggccgtctgggtgtggcggaccgctatcaggacatagcgttggctacccgtgatattgctgaagagcttggcggcgaatgggctgaccgcttccttgtgctttacggtatcgccgcgcccgattcgcagcgcatcgccttctatcgccttcttgacgagttcttctgaccgattctaggtgcattggcgcagaaaaaaatgcctgatgcgacgctgcgcgtcttatactcccacatatgccagattcagcaacggatacggcttccccaacttgcccacttccatacgtgtcctccttaccagaaatttatccttaaggtccgtaactataacggtcctaaggtagcgaatcgacctagctctatcgaatctccctcgtttcgagcttacgcgaactagcctctggcgatagcatccgaggggcaggcatctatgtcgggtgcggagaaagaggtaatgtcaagttcgatctgattgcttggcataaagtccgatggttcgagtagactcagttcaacctctctcttaaggtagc

SEQ ID NO: 66 - DNA, 32735 bp, Artificial Sequence
  pNG-sh01 virus genome sequence consisting of a transgene cassette encoding an shRNA to GAPDH inserted into the region BY
tctatctatataatataccttatagatggaatggtgccaatatgtaaatgaggtgattttaaaaagtgtggatcgtgtggtgattggctgtggggttaacggctaaaaggggcggtgcgaccgtgggaaaatgacgttttgtgggggtggagtttttttgcaagttgtcgcgggaaatgtgacgcataaaaaggcttttttctcacggaactacttagttttcccacggtatttaacaggaaatgaggtagttttgaccggatgcaagtgaaaattgttgattttcgcgcgaaaactgaatgaggaagtgtttttctgaataatgtggtatttatggcagggtggagtatttgttcagggccaggtagactttgacccattacgtggaggtttcgattaccgtgttttttacctgaatttccgcgtaccgtgtcaaagtcttctgtttttacgtaggtgtcagctgatcgctagggtatttatacctcagggtttgtgtcaagaggccactcttgagtgccagcgagaagagttttctcctctgcgccggcagtttaataataaaaaaatgagagatttgcgatttctgcctcaggaaataatctctgctgagactggaaatgaaatattggagcttgtggtgcacgccctgatgggagacgatccggagccacctgtgcagctttttgagcctcctacgcttcaggaactgtatgatttagaggtagagggatcggaggattctaatgaggaagctgtaaatggcttttttaccgattctatgcttttagctgctaatgaagggttagaattagatccgcctttggacacttttgatactccaggggtaattgtggaaagcggtacaggtgtaagaaaattacctgatttgagttccgtggactgtgatttgcactgctatgaagacgggtttcctccgagtgatgaggaggaccatgaaaaggagcagtccatgcagactgcagcgggtgagggagtgaaggctgccaatgttggttttcagttggattgcccggagcttcctggacatggctgtaagtcttgtgaatttcacaggaaaaatactggagtaaaggaactgttatgttcgctttgttatatgagaacgcactgccactttatttacagtaagtgtgtttaagttaaaatttaaaggaatatgctgtttttcacatgtatattgagtgtgagttttgtgcttcttattataggtcctgtgtctgatgctgatgaatcaccatctcctgattctactacctcacctcctgagattcaagcacctgttcctgtggacgtgcgcaagcccattcctgtgaagcttaagcctgggaaacgtccagcagtggaaaaacttgaggacttgttacagggtggggacggacctttggacttgagtacacggaaacgtccaagacaataagtgttccatatccgtgtttacttaaggtgacgtcaatatttgtgtgacagtgcaatgtaataaaaatatgttaactgttcactggtttttattgctttttgggcggggactcaggtatataagtagaagcagacctgtgtggttagctcataggagctggctttcatccatggaggtttgggccattttggaagaccttaggaagactaggcaactgttagagaacgcttcggacggagtctccggtttttggagattctggttcgctagtgaattagctagggtagtttttaggataaaacaggactataaacaagaatttgaaaagttgttggtagattgcccaggactttttgaagctcttaatttgggccatcaggttcactttaaagaaaaagttttatcagttttagacttttcaaccccaggtagaactgctgctgctgtggcttttcttacttttatattagataaatggatcccgcagactcatttcagcaggggatacgttttggatttcatagccacagcattgtggagaacatggaaggttcgcaagatgaggacaatcttaggttactggccagtgcagcctttgggtgtagcgggaatcctgaggcatccaccggtcatgccagcggttctggaggaggaacagcaagaggacaacccgagagccggcctggaccctccagtggaggaggcggagtagctgacttgtctcctgaactgcaacgggtgcttactggatctacgtccactggacgggataggggcgttaagagggagagggcatctagtggtactgatgctagatctgagttggctttaagtttaatgagtcgcagacgtcctgaaaccatttggtggcatgaggttcagaaagagggaagggatgaagtttctgtattgcaggagaaatattcactggaacaggtgaaaacatgttggttggagcctgaggatgattgggaggtggccattaaaaattatgccaagatagctttgaggcctgataaacagtataagattactagacggattaatatccggaatgcttgttacatatctggaaatggggctgaggtggtaatagatactcaagacaaggcagttattagatgctgcatgatggatatgtggcctggggtagtcggtatggaagcagtaacttttgtaaatgttaagtttaggggagatggttataatggaatagtgtttatggccaataccaaacttatattgcatggttgtagcttttttggtttcaacaatacctgtgtagatgcctggggacaggttagtgtacggggatgtagtttctatgcgtgttggattgccacagctggcagaaccaagagtcaattgtctctgaagaaatgcatatttcaaagatgtaacctgggcattctgaatgaaggcgaagcaagggtccgccactgcgcttctacagatactggatgttttattttgattaagggaaatgccagcgtaaagcataacatgatttgcggtgcttccgatgagaggccttatcaaatgctcacttgtgctggtgggcattgtaatatgctggctactgtgcatattgtttcccatcaacgcaaaaaatggcctgtttttgatcacaatgtgatgacgaagtgtaccatgcatgcaggtgggcgtagaggaatgtttatgccttaccagtgtaacatgaatcatgtgaaagtgttgttggaaccagatgccttttccagaatgagcctaacaggaatttttgacatgaacatgcaaatctggaagatcctgaggtatgatgatacgagatcgagggtacgcgcatgcgaatgcggaggcaagcatgccaggttccagccggtgtgtgtagatgtgactgaagatctcagaccggatcatttggttattgcccgcactggagcagagttcggatccagtggagaagaaactgactaaggtgagtattgggaaaactttggggtgggattttcagatggacagattgagtaaaaatttgttttttctgtcttgcagctgtcatgagtggaaacgcttcttttaaggggggagtcttcagcccttatctgacagggcgtctcccatcctgggcaggagttcgtcagaatgttatgggatctactgtggatggaagacccgtccaacccgccaattcttcaacgctgacctatgctactttaagttcttcacctttggacgcagctgcagctgccgccgccgcttctgttgccgctaacactgtgcttggaatgggttactatggaagcatcatggctaattccacttcctctaataacccttctaccctgactcaggacaagttacttgtccttttggcccagctggaggctttgacccaacgtctgggtgaactttctcagcaggtggtcgagttgcgagtacaaactgagtctgctgtcggcacggcaaagtctaaataaaaaaatcccagaatcaatgaataaataaacaagcttgttgttgatttaaaatcaagtgtttttatttcatttttcgcgcacggtatgccctagaccaccgatctctatcattgagaactcggtggattttttccaggatcctatagaggtgggattgaatgtttagatacatgggcattaggccgtctttggggtggagatagctccattgaagggattcatgctccggggtagtgttgtaaatcacccagtcataacaaggtcgcagtgcatggtgttgcacaatatcttttagaagtaggctgattgccacagataagcccttggtgtaggtgtttacaaaccggttgagctgggatgggtgcattcggggtgaaattatgtgcattttggattggatttttaagttggcaatattgccgccaagatcccgtcttgggttcatgttatgaaggaccaccaagacggtgtatccggtacatttaggaaatttatcgtgcagcttggatggaaaagcgtggaaaaatttggagacacccttgtgtcctccaagattttccatgcactcatccatgataatagcaatggggccgtgggcagcggcgcgggcaaacacgttccgtgggtctgacacatcatagttatgttcctgagttaaatcatcataagccattttaatgaatttggggcggagagtaccagattggggtatgaatgttccttcgggccccggagcatagttcccctcacagatttgcatttcccaagctttcagttccgagggtggaatcatgtccacctggggggctatgaaaaacaccgtttctggggcgggggtgattaattgtgatgatagcaaatttctgagcaattgagatttgccacatccggtggggccataaatgattccgattacgggttgcaggtggtagtttagggaacggcaactgccgtcttctcgaagcaagggggccacctcgttcatcatttcccttacatgcatattttcccgcaccaaatccattaggaggcgctctcctcctagtgatagaagttcttgtagtgaggaaaagtttttcagcggtttcagaccgtcagccatgggcattttggagagagtttgctgcaaaagttctagtctgttccacagttcagtgatgtgttctatggcatctcgatccagcagacctcctcgtttcgcgggtttggacggctcctggaatagggtatgagacgatgggcgtccagcgctgccagggttcggtccttccagggtctcagtgttcgagtcagggttgtttccgtcacagtgaaggggtgtgcgcctgcttgggcgcttgccagggtgcgcttcagactcatcctgctggtcgaaaacttctgtcgcttggcgccctgtatgtcggccaagtagcagtttaccatgagttcgtagttgagcgcctcggctgcgtggcctttggcgcggagcttacctttggaagttttcttgcataccgggcagtataggcatttcagcgcatacaacttgggcgcaaggaaaacggattctggggagtatgcatctgcgccgcaggaggcgcaaacagtttcacattccaccagccaggttaaatccggttcattggggtcaaaaacaagttttccgccatattttttgatgcgtttcttacctttggtctccatgagttcgtgtcctcgttgagtgacaaacaggctgtccgtgtccccgtagactgattttacaggcctcttctccagtggagtgcctcggtcttcttcgtacaggaactctgaccactctgatacaaaggcgcgcgtccaggccagcacaaaggaggctatgtgggaggggtagcgatcgttgtcaaccagggggtccaccttttccaaagtatgcaaacacatgtcaccctcttcaacatccaggaatgtgattggcttgtaggtgtatttcacgtgacctggggtccccgctgggggggtataaaagggggcggttctttgctcttcctcactgtcttccggatcgctgtccaggaacgtcagctgttggggtaggtattccctctcgaaggcgggcatgacctctgcactcaggttgtcagtttctaagaacgaggaggatttgatattgacagtgccggttgagatgcctttcatgaggttttcgtccatctggtcagaaaacacaatttttttattgtcaagtttggtggcaaatgatccatacagggcgttggataaaagtttggcaatggatcgcatggtttggttcttttccttgtccgcgcgctctttggcggcgatgttgagttggacatactcgcgtgccaggcacttccattcggggaagatagttgttaattcatctggcacgattctcacttgccaccctcgattatgcaaggtaattaaatccacactggtggccacctcgcctcgaaggggttcattggtccaacagagcctacctcctttcctagaacagaaagggggaagtgggtctagcataagttcatcgggagggtctgcatccatggtaaagattcccggaagtaaatccttatcaaaatagctgatgggagtggggtcatctaaggccatttgccattctcgagctgccagtgcgcgctcatatgggttaaggggactgccccatggcatgggatgggtgagtgcagaggcatacatgccacagatgtcatagacgtagatgggatcctcaaagatgcctatgtaggttggatagcatcgcccccctctgatacttgctcgcacatagtcatatagttcatgtgatggcgctagcagccccggacccaagttggtgcgattgggtttttctgttctgtagacgatctggcgaaagatggcgtgagaattggaagagatggtgggtctttgaaaaatgttgaaatgggcatgaggtagacctacagagtctctgacaaagtgggcataagattcttgaagcttggttaccagttcggcggtgacaagtacgtctagggcgcagtagtcaagtgtttcttgaatgatgtcataacctggttggtttttcttttcccacagttcgcggttgagaaggtattcttcgcgatccttccagtactcttctagcggaaacccgtctttgtctgcacggtaagatcctagcatgtagaactgattaactgccttgtaagggcagcagcccttctctacgggtagagagtatgcttgagcagcttttcgtagcgaagcgtgagtaagggcaaaggtgtctctgaccatgactttgaggaattggtatttgaagtcgatgtcgtcacaggctccctgttcccagagttggaagtctacccgtttcttgtaggcggggttgggcaaagcgaaagtaacatcattgaagagaatcttgccggccctgggcatgaaattgcgagtgatgcgaaaaggctgtggtacttccgctcggttattgataacctgggcagctaggacgatctcgtcgaaaccgttgatgttgtgtcctacgatgtataattctatgaaacgcggcgtgcctctgacgtgaggtagcttactgagctcatcaaaggttaggtctgtggggtcagataaggcgtagtgttcgagagcccattcgtgcaggtgaggattcgctttaaggaaggaggaccagaggtccactgccagtgctgtttgtaactggtcccggtactgacgaaaatgccgtccgactgccattttttctggggtgacgcaatagaaggtttgggggtcctgccgccagcgatcccacttgagttttatggcgaggtcataggcgatgttgacgagccgctggtctccagagagtttcatgaccagcatgaaggggattagctgcttgccaaaggaccccatccaggtgtaggtttccacatcgtaggtgagaaagagcctttctgtgcgaggatgagagccaatcgggaagaactggatctcctgccaccagttggaggaatggctgttgatgtgatggaagtagaactccctgcgacgcgccgagcattcatgcttgtgcttgtacagacggccgcagtagtcgcagcgttgcacgggttgtatctcgtgaatgagttgtacctggcttcccttgacgagaaatttcagtgggaagccgaggcctggcgattgtatctcgtgctttactatgttgtctgcatcggcctgttcatcttctgtctcgatggtggtcatgctgacgagccctcgcgggaggcaagtccagacctcggcgcggcaggggcggagctcgaggacgagagcgcgcaggctggagctgtccagggtcctgagacgctgcggactcaggttagtaggcagtgtcaggagattaacttgcatgatcttttggagggcgtgcgggaggttcagatagtacttgatctcaacgggtccgttggtggagatgtcgatggcttgcagggttccgtgtcccttgggcgctaccaccgtgcccttgtttttcattttggacggcggtggctctgttgcttcttgcatgtttagaagcggtgtcgagggcgcgcaccgggcggcaggggcggctcgggacccggcggcatggctggcagtggtacgtcggcgccgcgcgcgggtaggttctggtactgcgccctgagaagactcgcatgcgcgacgacgcggcggttgacatcctggatctgacgcctctgggtgaaagctaccggccccgtgagcttgaacctgaaagagagttcaacagaatcaatctcggtatcgttgacggcggcttgcctaaggatttcttgcacgtcaccagagttgtcctggtaggcgatctccgccatgaactgctcgatctcttcctcttgaagatctccgcggcccgctctctcgacggtggccgcgaggtcgttggagatgcgcccaatgagttgagagaatgcattcatgcccgcctcgttccagacgcggctgtagaccacggcccccacgggatctctcgcgcgcatgaccacctgggcgaggttgagctccacgtggcgggtgaagaccgcatagttgcataggcgctggaaaaggtagttgagtgtggtggcgatgtgctcggtgacgaagaaatacatgatccatcgtctcagcggcatctcgctgacatcgcccagagcttccaagcgctccatggcctcgtagaagtccacggcaaaattaaaaaactgggagtttcgcgcggacacggtcaactcctcttccagaagacggataagttcggcgatggtggtgcgcacctcgcgctcgaaagcccctgggatttcttcctcaatctcttcttcttccactaacatctcttcctcttcaggtggggctgcaggaggagggggaacgcggcgacgccggcggcgcacgggcagacggtcgatgaatctttcaatgacctctccgcggcggcggcgcatggtttcagtgacggcgcggccgttctcgcgcggtcgcagagtaaaaacaccgccgcgcatctccttaaagtggtgactgggaggttctccgtttgggagggagagggcgctgattatacattttattaattggcccgtagggactgcacgcagagatctgatcgtgtcaagatccacgggatctgaaaacctttcgacgaaagcgtctaaccagtcacagtcacaaggtaggctgagtacggcttcttgtgggcgggggtggttatgtgttcggtctgggtcttctgtttcttcttcatctcgggaaggtgagacgatgctgctggtgatgaaattaaagtaggcagttctaagacggcggatggtggcgaggagcaccaggtctttgggtccggcttgctggatacgcaggcgattggccattccccaagcattatcctgacatctagcaagatctttgtagtagtcttgcatgagccgttctacgggcacttcttcctcacccgttctgccatgcatacgtgtgagtccaaatccgcgcattggttgtaccagtgccaagtcagctacgactctttcggcgaggatggcttgctgtacttgggtaagggtggcttgaaagtcatcaaaatccacaaagcggtggtaagctcctgtattaatggtgtaagcacagttggccatgactgaccagttaactgtctggtgaccagggcgcacgagctcggtgtatttaaggcgcgaataggcgcgggtgtcaaagatgtaatcgttgcaggtgcgcaccagatactggtaccctataagaaaatgcggcggtggttggcggtagagaggccatcgttctgtagctggagcgccaggggcgaggtcttccaacataaggcggtgatagccgtagatgtacctggacatccaggtgattcctgcggcggtagtagaagcccgaggaaactcgcgtacgcggttccaaatgttgcgtagcggcatgaagtagttcattgtaggcacggtttgaccagtgaggcgcgcgcagtcattgatgctctatagacacggagaaaatgaaagcgttcagcgactcgactccgtagcctggaggaacgtgaacgggttgggtcgcggtgtaccccggttcgagacttgtactcgagccggccggagccgcggctaacgtggtattggcactcccgtctcgacccagcctacaaaaatccaggatacggaatcgagtcgttttgctggtttccgaatggcagggaagtgagtcctattttttttttttgccgctcagatgcatcccgtgctgcgacagatgcgcccccaacaacagcccccctcgcagcagcagcagcagcaatcacaaaaggctgtccctgcaactactgcaactgccgccgtgagcggtgcgggacagcccgcctatgatctggacttggaagagggcgaaggactggcacgtctaggtgcgccttcacccgagcggcatccgcgagttcaactgaaaaaagattctcgcgaggcgtatgtgccccaacagaacctatttagagacagaagcggcgaggagccggaggagatgcgagcttcccgctttaacgcgggtcgtgagctgcgtcacggtttggaccgaagacgagtgttgcgggacgaggatttcgaagttgatgaaatgacagggatcagtcctgccagggcacacgtggctgcagccaaccttgtatcggcttacgagcagacagtaaaggaagagcgtaacttccaaaagtcttttaataatcatgtgcgaaccctgattgcccgcgaagaagttacccttggtttgatgcatttgtgggatttgatggaagctatcattcagaaccctactagcaaacctctgaccgcccagctgtttctggtggtgcaacacagcagagacaatgaggctttcagagaggcgctgctgaacatcaccgaacccgaggggagatggttgtatgatcttatcaacattctacagagtatcatagtgcaggagcggagcctgggcctggccgagaaggtggctgccatcaattactcggttttgagcttgggaaaatattacgctcgcaaaatctacaagactccatacgttcccatagacaaggaggtgaagatagatgggttctacatgcgcatgacgctcaaggtcttgaccctgagcgatgatcttggggtgtatcgcaatgacagaatgcatcgcgcggttagcgccagcaggaggcgcgagttaagcgacagggaactgatgcacagtttgcaaagagctctgactggagctggaaccgagggtgagaattacttcgacatgggagctgacttgcagtggcagcctagtcgcagggctctgagcgccgcgacggcaggatgtgagcttccttacatagaagaggcggatgaaggcgaggaggaagagggcgagtacttggaagactgatggcacaacccgtgttttttgctagatggaacagcaagcaccggatcccgcaatgcgggcggcgctgcagagccagccgtccggcattaactcctcggacgattggacccaggccatgcaacgtatcatggcgttgacgactcgcaaccccgaagcctttagacagcaaccccaggccaaccgtctatcggccatcatggaagctgtagtgccttcccgctctaatcccactcatgagaaggtcctggccatcgtgaacgcgttggtggagaacaaagctattcgtccagatgaggccggactggtatacaacgctctcttagaacgcgtggctcgctacaacagtagcaatgtgcaaaccaatttggaccgtatgataacagatgtacgcgaagccgtgtctcagcgcgaaaggttccagcgtgatgccaacctgggttcgctggtggcgttaaatgctttcttgagtactcagcctgctaatgtgccgcgtggtcaacaggattatactaactttttaagtgctttgagactgatggtatcagaagtacctcagagcgaagtgtatcagtccggtcctgattacttctttcagactagcagacagggcttgcagacggtaaatctgagccaagcttttaaaaaccttaaaggtttgtggggagtgcatgccccggtaggagaaagagcaaccgtgtctagcttgttaactccgaactcccgcctattattactgttggtagctcctttcaccgacagcggtagcatcgaccgtaattcctatttgggttacctactaaacctgtatcgcgaagccatagggcaaagtcaggtggacgagcagacctatcaagaaattacccaagtcagtcgcgctttgggacaggaagacactggcagtttggaagccactctgaacttcttgcttaccaatcggtctcaaaagatccctcctcaatatgctcttactgcggaggaggagaggatccttagatatgtgcagcagagcgtgggattgtttctgatgcaagagggggcaactccgactgcagcactggacatgacagcgcgaaatatggagcccagcatgtatgccagtaaccgacctttcattaacaaactgctggactacttgcacagagctgccgctatgaactctgattatttcaccaatgccatcttaaacccgcactggctgcccccacctggtttctacacgggcgaatatgacatgcccgaccctaatgacggatttctgtgggacgacgtggacagcgatgttttttcacctctttctgatcatcgcacgtggaaaaaggaaggcggcgatagaatgcattcttctgcatcgctgtccggggtcatgggtgctaccgcggctgagcccgagtctgcaagtccttttcctagtctacccttttctctacacagtgtacgtagcagcgaagtgggtagaataagtcgcccgagtttaatgggcgaagaggagtatctaaacgattccttgctcagaccggcaagagaaaaaaatttcccaaacaatggaatagaaagtttggtggataaaatgagtagatggaagacttatgctcaggatcacagagacgagcctgggatcatggggattacaagtagagcgagccgtagacgccagcgccatgacagacagaggggtcttgtgtgggacgatgaggattcggccgatgatagcagcgtgctggacttgggtgggagaggaaggggcaacccgtttgctcatttgcgccctcgcttgggtggtatgttgtaaaaaaaaataaaaaaaaaactcaccaaggccatggcgacgagcgtacgttcgttcttctttattatctgtgtctagtataatgaggcgagtcgtgctaggcggagcggtggtgtatccggagggtcctcctccttcgtacgagagcgtgatgcagcagcagcaggcgacggcggtgatgcaatccccactggaggctccctttgtgcctccgcgatacctggcacctacggagggcagaaacagcattcgttattcggaactggcacctcagtacgataccaccaggttgtatctggtggacaacaagtcggcggacattgcttctctgaactatcagaatgaccacagcaacttcttgaccacggtggtgcaaaacaatgactttacccctacggaagccagcacccagaccattaactttgatgaacgatcgcggtggggcggtcagctaaagaccatcatgcatactaacatgccaaacgtgaacgagtatatgtttagtaacaagttcaaagcgcgtgtgatggtgtccagaaaacctcccgacggtgctgcagttggggatacttatgatcacaagcaggatattttgaaatatgagtggttcgagtttactttgccagaaggcaacttttcagttactatgactattgatttgatgaacaatgccatcatagataattacttgaaagtgggtagacagaatggagtgcttgaaagtgacattggtgttaagttcgacaccaggaacttcaagctgggatgggatcccgaaaccaagttgatcatgcctggagtgtatacgtatgaagccttccatcctgacattgtcttactgcctggctgcggagtggattttaccgagagtcgtttgagcaaccttcttggtatcagaaaaaaacagccatttcaagagggttttaagattttgtatgaagatttagaaggtggtaatattccggccctcttggatgtagatgcctatgagaacagtaagaaagaacaaaaagccaaaatagaagctgctacagctgctgcagaagctaaggcaaacatagttgccagcgactctacaagggttgctaacgctggagaggtcagaggagacaattttgcgccaacacctgttccgactgcagaatcattattggccgatgtgtctgaaggaacggacgtgaaactcactattcaacctgtagaaaaagatagtaagaatagaagctataatgtgttggaagacaaaatcaacacagcctatcgcagttggtatctttcgtacaattatggcgatcccgaaaaaggagtgcgttcctggacattgctcaccacctcagatgtcacctgcggagcagagcaggtctactggtcgcttccagacatgatgaaggatcctgtcactttccgctccactagacaagtcagtaactaccctgtggtgggtgcagagcttatgcccgtcttctcaaagagcttctacaacgaacaagctgtgtactcccagcagctccgccagtccacctcgcttacgcacgtcttcaaccgctttcctgagaaccagattttaatccgtccgccggcgcccaccattaccaccgtcagtgaaaacgttcctgctctcacagatcacgggaccctgccgttgcgcagcagtatccggggagtccaacgtgtgaccgttactgacgccagacgccgcacctgtccctacgtgtacaaggcactgggcatagtcgcaccgcgcgtcctttcaagccgcactttctaaaaaaaaaaaaaatgtccattcttatctcgcccagtaataacaccggttggggtctgcgcgctccaagcaagatgtacggaggcgcacgcaaacgttctacccaacatcctgtccgtgttcgcggacattttcgcgctccatggggcgccctcaagggccgcactcgcgttcgaaccaccgtcgatgatgtaatcgatcaggtggttgccgacgcccgtaattatactcctactgcgcctacatctactgtggatgcagttattgacagtgtagtggctgacgctcgcaactatgctcgacgtaagagccggcgaaggcgcattgccagacgccaccgagctaccactgccatgcgagccgcaagagctctgctacgaagagctagacgcgtggggcgaagagccatgcttagggcggccagacgtgcagcttcgggcgccagcgccggcaggtcccgcaggcaagcagccgctgtcgcagcggcgactattgccgacatggcccaatcgcgaagaggcaatgtatactgggtgcgtgacgctgccaccggtcaacgtgtacccgtgcgcacccgtccccctcgcacttagaagatactgagcagtctccgatgttgtgtcccagcggcgaggatgtccaagcgcaaatacaaggaagaaatgctgcaggttatcgcacctgaagtctacggccaaccgttgaaggatgaaaaaaaaccccgcaaaatcaagcgggttaaaaaggacaaaaaagaagaggaagatggcgatgatgggctggcggagtttgtgcgcgagtttgccccacggcgacgcgtgcaatggcgtgggcgcaaagttcgacatgtgttgagacctggaacttcggtggtctttacacccggcgagcgttcaagcgctacttttaagcgttcctatgatgaggtgtacggggatgatgatattcttgagcaggcggctgaccgattaggcgagtttgcttatggcaagcgtagtagaataacttccaaggatgagacagtgtcgatacccttggatcatggaaatcccacccctagtcttaaaccggtcactttgcagcaagtgttacccgtaactccgcgaacaggtgttaaacgcgaaggtgaagatttgtatcccactatgcaactgatggtacccaaacgccagaagttggaggacgttttggagaaagtaaaagtggatccagatattcaacctgaggttaaagtgagacccattaagcaggtagcgcctggtctgggggtacaaactgtagacattaagattcccactgaaagtatggaagtgcaaactgaacccgcaaagcctactgccacctccactgaagtgcaaacggatccatggatgcccatgcctattacaactgacgccgccggtcccactcgaagatcccgacgaaagtacggtccagcaagtctgttgatgcccaattatgttgtacacccatctattattcctactcctggttaccgaggcactcgctactatcgcagccgaaacagtacctcccgccgtcgccgcaagacacctgcaaatcgcagtcgtcgccgtagacgcacaagcaaaccgactcccggcgccctggtgcggcaagtgtaccgcaatggtagtgcggaacctttgacactgccgcgtgcgcgttaccatccgagtatcatcacttaatcaatgttgccgctgcctccttgcagatatggccctcacttgtcgccttcgcgttcccatcactggttaccgaggaagaaactcgcgccgtagaagagggatgttgggacgcggaatgcgacgctacaggcgacggcgtgctatccgcaagcaattgcggggtggttttttaccagccttaattccaattatcgctgctgcaattggcgcgataccaggcatagcttccgtggcggttcaggcctcgcaacgacattgacattggaaaaaaacgtataaataaaaaaaaaaaaatacaatggactctgacactcctggtcctgtgactatgttttcttagagatggaagacatcaatttttcatccttggctccgcgacacggcacgaagccgtacatgggcacctggagcgacatcggcacgagccaactgaacgggggcgccttcaattggagcagtatctggagcgggcttaaaaattttggctcaaccataaaaacatacgggaacaaagcttggaacagcagtacaggacaggcgcttagaaataaacttaaagaccagaacttccaacaaaaagtagtcgatgggatagcttccggcatcaatggagtggtagatttggctaaccaggctgtgcagaaaaagataaacagtcgtttggacccgccgccagcaaccccaggtgaaatgcaagtggaggaagaaattcctccgccagaaaaacgaggcgacaagcgtccgcgtcccgatttggaagagacgctggtgacgcgcgtagatgaaccgccttcttatgaggaagcaacgaagcttggaatgcccaccactagaccgatagccccaatggccaccggggtgatgaaaccttctcagttgcatcgacccgtcaccttggatttgccccctccccctgctgctactgctgtacccgcttctaagcctgtcgctgccccgaaaccagtcgccgtagccaggtcacgtcccgggggcgctcctcgtccaaatgcgcactggcaaaatactctgaacagcatcgtgggtctaggcgtgcaaagtgtaaaacgccgtcgctgcttttaattaaatatggagtagcgcttaacttgcctatctgtgtatatgtgtcattacacgccgtcacagcagcagaggaaaaaaggaagaggtcgtgcgtcgacgctgagttactttcaagatggccaccccatcgatgctgccccaatgggcatacatgcacatcgccggacaggatgcttcggagtacctgagtccgggtctggtgcagttcgcccgcgccacagacacctacttcaatctgggaaataagtttagaaatcccaccgtagcgccgacccacgatgtgaccaccgaccgtagccagcggctcatgttgcgcttcgtgcccgttgaccgggaggacaatacatactcttacaaagtgcggtacaccctggccgtgggcgacaacagagtgctggatatggccagcacgttctttgacattaggggtgtgttggacagaggtcccagtttcaaaccctattctggtacggcttacaactccctggctcctaaaggcgctccaaatacatctcagtggattgcagaaggtgtaaaaaatacaactggtgaggaacacgtaacagaagaggaaaccaatactactacttacacttttggcaatgctcctgtaaaagctgaagctgaaattacaaaagaaggactcccagtaggtttggaagtttcagatgaagaaagtaaaccgatttatgctgataaaacatatcagccagaacctcagctgggagatgaaacttggactgaccttgatggaaaaaccgaaaagtatggaggcagggctctcaaacccgatactaagatgaaaccatgctacgggtcctttgccaaacctactaatgtgaaaggcggtcaggcaaaacaaaaaacaacggagcagccaaatcagaaagtcgaatatgatatcgacatggagttttttgatgcggcatcgcagaaaacaaacttaagtcctaaaattgtcatgtatgcagaaaatgtaaatttggaaactccagacactcatgtagtgtacaaacctggaacagaagacacaagttccgaagctaatttgggacaacaatctatgcccaacagacccaactacattggcttcagagataactttattggacttatgtactataacagtactggtaacatgggggtgctggctggtcaagcgtctcagttaaatgcagtggttgacttgcaggacagaaacacagaactttcttaccaactcttgcttgactctctgggcgacagaaccagatactttagcatgtggaatcaggctgtggacagttatgatcctgatgtacgtgttattgaaaatcatggtgtggaagatgaacttcccaactactgttttccactggacggcataggtgttccaacaaccagttacaaatcaatagttccaaatggagacaatgcgcctaattggaaggaacctgaagtaaatggaacaagtgagatcggacagggtaatttgtttgccatggaaattaaccttcaagccaatctatggcgaagtttcctttattccaatgtggctctatatctcccagactcgtacaaatacaccccgtccaatgtcactcttccagaaaacaaaaacacctacgactacatgaacgggcgggtggtgccgccatctctagtagacacctatgtgaacattggtgccaggtggtctctggatgccatggacaatgtcaacccattcaaccaccaccgtaacgctggcttgcgttaccgatccatgcttctgggtaacggacgttatgtgcctttccacatacaagtgcctcaaaaattcttcgctgttaaaaacctgctgcttctcccaggctcctacacttatgagtggaactttaggaaggatgtgaacatggttctacagagttccctcggtaacgacctgcgggtagatggcgccagcatcagtttcacgagcatcaacctctatgctacttttttccccatggctcacaacaccgcttccacccttgaagccatgctgcggaatgacaccaatgatcagtcattcaacgactacctatctgcagctaacatgctctaccccattcctgccaatgcaaccaatattcccatttccattccttctcgcaactgggcggctttcagaggctggtcatttaccagactgaaaaccaaagaaactccctctttggggtctggatttgacccctactttgtctattctggttctattccctacctggatggtaccttctacctgaaccacacttttaagaaggtttccatcatgtttgactcttcagtgagctggcctggaaatgacaggttactatctcctaacgaatttgaaataaagcgcactgtggatggcgaaggctacaacgtagcccaatgcaacatgaccaaagactggttcttggtacagatgctcgccaactacaacatcggctatcagggcttctacattccagaaggatacaaagatcgcatgtattcatttttcagaaacttccagcccatgagcaggcaggtggttgatgaggtcaattacaaagacttcaaggccgtcgccataccctaccaacacaacaactctggctttgtgggttacatggctccgaccatgcgccaaggtcaaccctatcccgctaactatccctatccactcattggaacaactgccgtaaatagtgttacgcagaaaaagttcttgtgtgacagaaccatgtggcgcataccgttctcgagcaacttcatgtctatgggggcccttacagacttgggacagaatatgctctatgccaactcagctcatgctctggacatgacctttgaggtggatcccatggatgagcccaccctgctttatcttctcttcgaagttttcgacgtggtcagagtgcatcagccacaccgcggcatcatcgaggcagtctacctgcgtacaccgttctcggccggtaacgctaccacgtaagaagcttcttgcttcttgcaaatagcagctgcaaccatggcctgcggatcccaaaacggctccagcgagcaagagctcagagccattgtccaagacctgggttgcggaccctattttttgggaacctacgataagcgcttcccggggttcatggcccccgataagctcgcctgtgccattgtaaatacggccggacgtgagacggggggagagcactggttggctttcggttggaacccacgttctaacacctgctacctttttgatccttttggattctcggatgatcgtctcaaacagatttaccagtttgaatatgagggtctcctgcgccgcagcgctcttgctaccaaggaccgctgtattacgctggaaaaatctacccagaccgtgcagggtccccgttctgccgcctgcggacttttctgctgcatgttccttcacgcctttgtgcactggcctgaccgtcccatggacggaaaccccaccatgaaattgctaactggagtgccaaacaacatgcttcattctcctaaagtccagcccaccctgtgtgacaatcaaaaagcactctaccattttcttaatacccattcgccttattttcgctcccatcgtacacacatcgaaagggccactgcgttcgaccgtatggatgttcaataatgactcatgtaaacaacgtgttcaataaacatcactttatttttttacatgtatcaaggctctgcattacttatttatttacaagtcgaatgggttctgacgagaatcagaatgacccgcaggcagtgatacgttgcggaactgatacttgggttgccacttgaattcgggaatcaccaacttgggaaccggtatatcgggcaggatgtcactccacagctttctggtcagctgcaaagctccaagcaggtcaggagccgaaatcttgaaatcacaattaggaccagtgctttgagcgcgagagttgcggtacaccggattgcagcactgaaacaccatcagcgacggatgtctcacgcttgccagcacggtgggatctgcaatcatgcccacatccagatcttcagcattggcaatgctgaacggggtcatcttgcaggtctgcctacccatggcgggcacccaattaggcttgtggttgcaatcgcagtgcagggggatcagtatcatcttggcctgatcctgtctgattcctggatacacggctctcatgaaagcatcatattgcttgaaagcctgctgggctttactaccctcggtataaaacatcccgcaggacctgctcgaaaactggttagctgcacagccggcatcattcacacagcagcgggcgtcattgttagctatttgcaccacacttctgccccagcggttttgggtgattttggttcgctcgggattctcctttaaggctcgttgtccgttctcgctggccacatccatctcgataatctgctccttctgaatcataatattgccatgcaggcacttcagcttgccctcataatcattgcagccatgaggccacaacgcacagcctgtacattcccaattatggtgggcgatctgagaaaaagaatgtatcattccctgcagaaatcttcccatcatcgtgctcagtgtcttgtgactagtgaaagttaactggatgcctcggtgctcctcgtttacgtactggtgacagatgcgcttgtattgttcgtgttgctcaggcattagtttaaaagaggttctaagttcgttatccagcctgtacttctccatcagcagacacatcacttccatgcctttctcccaagcagacaccaggggcaagctaatcggattcttaacagtgcaggcagcagctcctttagccagagggtcatctttagcgatcttctcaatgcttcttttgccatccttctcaacgatgcgcacgggcgggtagctgaaacccactgctacaagttgcgcctcttctctttcttcttcgctgtcttgactgatgtcttgcatggggatatgtttggtcttccttggcttctttttggggggtatcggaggaggaggactgtcgctccgttccggagacagggaggattgtgacgtttcgctcaccattaccaactgactgtcggtagaagaacctgaccccacacggcgacaggtgtttctcttcgggggcagaggtggaggcgattgcgaagggctgcggtccgacctggaaggcggatgactggcagaaccccttccgcgttcgggggtgtgctccctgtggcggtcgcttaactgatttccttcgcggctggccattgtgttctcctaggcagagaaacaacagacatggaaactcagccattgctgtcaacatcgccacgagtgccatcacatctcgtcctcagcgacgaggaaaaggagcagagcttaagcattccaccgcccagtcctgccaccacctctaccctagaagataaggaggtcgacgcatctcatgacatgcagaataaaaaagcgaaagagtctgagacagacatcgagcaagacccgggctatgtgacaccggtggaacacgaggaagagttgaaacgctttctagagagagaggatgaaaactgcccaaaacaacgagcagataactatcaccaagatgctggaaatagggatcagaacaccgactacctcatagggcttgacggggaagacgcgctccttaaacatctagcaagacagtcgctcatagtcaaggatgcattattggacagaactgaagtgcccatcagtgtggaagagctcagccgcgcctacgagcttaacctcttttcacctcgtactccccccaaacgtcagccaaacggcacctgcgagccaaatcctcgcttaaacttttatccagcttttgctgtgccagaagtactggctacctatcacatcttttttaaaaatcaaaaaattccagtctcctgccgcgctaatcgcacccgcgccgatgccctactcaatctgggacctggttcacgcttacctgatatagcttccttggaagaggttccaaagatcttcgagggtctgggcaataatgagactcgggccgcaaatgctctgcaaaagggagaaaatggcatggatgagcatcacagcgttctggtggaattggaaggcgataatgccagactcgcagtactcaagcgaagcatcgaggtcacacacttcgcatatcccgctgtcaacctgccccctaaagtcatgacggcggtcatggaccagttactcattaagcgcgcaagtcccctttcagaagacatgcatgacccagatgcctgtgatgagggtaaaccagtggtcagtgatgagcagctaacccgatggctgggcaccgactctcccagggatttggaagagcgtcgcaagcttatgatggccgtggtgctggttaccgtagaactagagtgtctccgacgtttctttaccgattcagaaaccttgcgcaaactcgaagagaatctgcactacacttttagacacggctttgtgcggcaggcatgcaagatatctaacgtggaactcaccaacctggtttcctacatgggtattctgcatgagaatcgcctaggacaaagcgtgctgcacagcaccctgaagggggaagcccgccgtgattacatccgcgattgtgtctatctgtacctgtgccacacgtggcaaaccggcatgggtgtatggcagcaatgtttagaagaacagaacttgaaagagcttgacaagctcttacagaaatctcttaaggttctgtggacagggttcgacgagcgcaccgtcgcttccgacctggcagacctcatcttcccagagcgtctcagggttactttgcgaaacggattgcctgactttatgagccagagcatgcttaacaattttcgctctttcatcctggaacgctccggtatcctgcccgccacctgctgcgcactgccctccgactttgtgcctctcacctaccgcgagtgccccccgccgctatggagtcactgctacctgttccgtctggccaactatctctcctaccactcggatgtgatcgaggatgtgagcggagacggcttgctggagtgtcactgccgctgcaatctgtgcacgccccaccggtccctagcttgcaacccccagttgatgagcgaaacccagataataggcacctttgaattgcaaggccccagcagccaaggcgatgggtcttctcctgggcaaagtttaaaactgaccccgggactgtggacctccgcctacttgcgcaagtttgctccggaagattaccacccctatgaaatcaagttctatgaggaccaatcacagcctccaaaggccgaactttcggcctgcgtcatcacccagggggcaattctggcccaattgcaagccatccaaaaatcccgccaagaatttctactgaaaaagggtaagggggtctaccttgacccccagaccggcgaggaactcaacacaaggttccctcaggatgtcccaacgacgagaaaacaagaagttgaaggtgcagccgccgcccccagaagatatggaggaagattgggacagtcaggcagaggaggcggaggaggacagtctggaggacagtctggaggaagacagtttggaggaggaaaacgaggaggcagaggaggtggaagaagtaaccgccgacaaacagttatcctcggctgcggagacaagcaacagcgctaccatctccgctccgagtcgaggaacccggcggcgtcccagcagtagatgggacgagaccggacgcttcccgaacccaaccagcgcttccaagaccggtaagaaggatcggcagggatacaagtcctggcgggggcataagaatgccatcatctcctgcttgcatgagtgcgggggcaacatatccttcacgcggcgctacttgctattccaccatggggtgaactttccgcgcaatgttttgcattactaccgtcacctccacagcccctactatagccagcaaatcccggcagtctcgacagataaagacagcggcggcgacctccaacagaaaaccagcagcggcagttagaaaatacacaacaagtgcagcaacaggaggattaaagattacagccaacgagccagcgcaaacccgagagttaagaaatcggatctttccaaccctgtatgccatcttccagcagagtcggggtcaagagcaggaactgaaaataaaaaaccgatctctgcgttcgctcaccagaagttgtttgtatcacaagagcgaagatcaacttcagcgcactctcgaggacgccgaggctctcttcaacaagtactgcgcgctgactcttaaagagtaggcagcgaccgcgcttattcaaaaaaggcgggaattacatcatcctcgacatgagtaaagaaattcccacgccttacatgtggagttatcaaccccaaatgggattggcggcaggcgcctcccaggactactccacccgcatgaattggctcagcgccgggccttctatgatttctcgagttaatgatatacgcgcctaccgaaaccaaatacttttggaacagtcagctcttaccaccacgccccgccaacaccttaatcccagaaattggcccgccgccctagtgtaccaggaaagtcccgctcccaccactgtattacttcctcgagacgcccaggccgaagtccaaatgactaatgcaggtgcgcagttagctggcggctccaccctatgtcgtcacaggcctcggcataatataaaacgcctgatgatcagaggccgaggtatccagctcaacgacgagtcggtgagctctccgcttggtctacgaccagacggaatctttcagattgccggctgcgggagatcttccttcacccctcgtcaggctgttctgactttggaaagttcgtcttcgcaaccccgctcgggcggaatcgggaccgttcaatttgtggaggagtttactccctctgtctacttcaaccccttctccggatctcctgggcattacccggacgagttcataccgaacttcgacgcgattagcgagtcagtggacggctacgattgatgtctggtgacgcggctgagctatctcggctgcgacatctagaccactgccgccgctttcgctgctttgcccgggaactcattgagttcatctacttcgaactccccaaggatcaccctcaaggtccggcccacggagtgcggatttctatcgaaggcaaaatagactctcgcctgcaacgaattttctcccagcggcccgtgctgatcgagcgagaccagggaaacaccacggtttccatctactgcatttgtaatcaccccggattgcatgaaagcctttgctgtcttatgtgtactgagtttaataaaaactgaattaagactctcctacggactgccgcttcttcaacccggattttacaaccagaagaacgaaacttttcctgtcgtccaggactctgttaacttcacctttcctactcacaaactagaagctcaacgactacaccgcttttccagaagcattttccctactaatactactttcaaaaccggaggtgagctccaaggtcttcctacagaaaacccttgggtggaagcgggccttgtagtgctaggaattcttgcgggtgggcttgtgattattctttgctacctatacacaccttgcttcactttcttagtggtgttgtggtattggtttaaaaaatggggcccatactagtcttgcttgttttactttcgcttttggaaccgggttctgccaattacgatccatgtctagacttcgacccagaaaactgcacacttacttttgcacccgacacaagccgcatctgtggagttcatcgcctctcttacgaacttggcccccaacgacaaaaatttacctgcatggtgggaatcaaccccatagttatcacccagcaaagtggagatactaagggttgcattcactgctcctgcgattccatcgagtgcacctacaccctgctgaagaccctatgcggcctaagagacctgctaccaatgaattaaaaaatgattaataaaaaatcacttacttgaaatcagcaataaggtctctgttgaaattttctcccagcagcacctcacttccctcttcccaactctggtattctaaaccccgttcagcggcatactttctccatactttaaaggggatgtcaaattttagctcctctcctgtacccacaatcttcatgtctttcttcccagatgaccaagagagtccggctcagtgactccttcaaccctgtctacccctatgaagatgaaagcacctcccaacacccctttataaacccagggtttatttccccaaatggcttcacacaaagcccaaacggagttcttactttaaaatgtttaaccccactaacaaccacaggcggatctctacagctaaaagtgggagggggacttacagtggatgacaccaacggttttttgaaagaaaacataagtgccaccacaccactcgttaagactggtcactctataggtttaccactaggagccggattgggaacgaatgaaaataaactttgtatcaaattaggacaaggacttacattcaattcaaacaacatttgcattgatgacaatattaacaccttatggacaggagtcaaccccaccgaagccaactgtcaaatcatgaactccagtgaatctaatgattgcaaattaattctaacactagttaaaactggagcactagtcactgcatttgtttatgttataggagtatctaacaattttaatatgctaactacacacagaaatataaattttactgcagagctgtttttcgattctactggtaatttactaactagactctcatccctcaaaactccacttaatcataaatcaggacaaaacatggctactggtgccattactaatgctaaaggtttcatgcccagcacgactgcctatcctttcaatgataattctagagaaaaagaaaactacatttacggaacttgttactacacagctagtgatcgcactgcttttcccattgacatatctgtcatgcttaaccgaagagcaataaatgacgagacatcatattgtattcgtataacttggtcctggaacacaggagatgccccagaggtgcaaacctctgctacaaccctagtcacctccccatttaccttttactacatcagagaagacgactgacaaataaagtttgcgatcgcccccagtggaaagacgcgcaggcaaaacgcaccacgtgacggagcgtgaccgcgcgccgagcccaaggtcgggcaggaagagggcctatttcccatgattccttcatatttgcatatacgatacaaggctgttagagagataattagaattaatttgactgtaaacacaaagatattagtacaaaatacgtgacgtagaaagtaataatttcttgggtagtttgcagttttaaaattatgttttaaaatggactatcatatgcttaccgtaacttgaaagtatttcgatttcttggctttatatatcttgtggaaaggacggtaaaccatgtagttgaggtcaatgaagggaagcttgccttcattgacctcaactacatggtttacttttttcctgcaggaacttgtttatttgaaaatcaattcacaaaatccgagtagttattttgcctcccccttcccatttaacagaatacaccaatctctccccacgcacagctttaaacatttggataccattagatatagacatggttttagattccacattccaaacagtttcagagcgagccaatctggggtcagtgatagataaaaatccatcgggatagtcttttaaagcgctttcacagtccaactgctgcggatgcgactccggagtctggatcacggtcatctggaagaagaacgatgggaatcataatccgaaaacggtatcggacgattgtgtctcatcaaacccacaagcagccgctgtctgcgtcgctccgtgcgactgctgtttatgggatcagggtccacagtgtcctgaagcatgattttaatagcccttaacatcaactttctggtgcgatgcgcgcagcaacgcattctgatttcactcaaatctttgcagtaggtacaacacattattacaatattgtttaataaaccataattaaaagcgctccagccaaaactcatatctgatataatcgcccctgcatgaccatcataccaaagtttaatataaattaaatgacgttccctcaaaaacacactacccacatacatgatctcttttggcatgtgcatattaacaatctgtctgtaccatggacaacgttggttaatcatgcaacccaatataaccttccggaaccacactgccaacaccgctcccccagccatgcattgaagtgaaccctgctgattacaatgacaatgaagaacccaattctctcgaccgtgaatcacttgagaatgaaaaatatctatagtggcacaacatagacataaatgcatgcatcttctcataatttttaactcctcaggatttagaaacatatcccagggaataggaagctcttgcagaacagtaaagctggcagaacaaggaagaccacgaacacaacttacactatgcatagtcatagtatcacaatctggcaacagcgggtggtcttcagtcatagaagctcgggtttcattttcctcacaacgtggtaactgggctctggtgtaagggtgatgtctggcgcatgatgtcgagcgtgcgcgcaaccttgtcataatggagttgcttcctgacattctcgtattttgtatagcaaaacgcggccctggcagaacacactcttcttcgccttctatcctgccgcttagcgtgttccgtgtgatagttcaagtacaaccacactcttaagttggtcaaaagaatgctggcttcagttgtaatcaaaactccatcgcatctaatcgttctgaggaaatcatccaagcaatgcaactggattgtgtttcaagcaggagaggagagggaagagacggaagaaccatgttaatttttattccaaacgatctcgcagtacttcaaattgtagatcgcgcagatggcatctctcgcccccactgtgttggtgaaaaagcacagctagatcaaaagaaatgcgattttcaaggtgctcaacggtggcttccagcaaagcctccacgcgcacatccaagaacaaaagaataccaaaagaaggagcattttctaactcctcaatcatcatattacattcctgcaccattcccagataattttcagctttccagccttgaattattcgtgtcagttcttgtggtaaatccaatccacacattacaaacaggtcccggagggcgccctccaccaccattcttaaacacaccctcataatgacaaaatatcttgctcctgtgtcacctgtagcgaattgagaatggcaacatcaattgacatgcccttggctctaagttcttctttaagttctagttgtaaaaactctctcatattatcaccaaactgcttagccagaagccccccgggaacaagagcaggggacgctacagtgcagtacaagcgcagacctccccaattggctccagcaaaaacaagattggaataagcatattgggaaccgccagtaatatcatcgaagttgctggaaatataatcaggcagagtttcttgtaaaaattgaataaaagaaaaatttgccaaaaaaacattcaaaacctctgggatgcaaatgcaataggttaccgcgctgcgctccaacattgttagttttgaattagtctgcaaaaataaaaaaaaaaacaagcgtcatatcatagtagcctgacgaacagatggataaatcagtctttccatcacaagacaagccacagggtctccagctcgaccctcgtaaaacctgtcatcatgattaaacaacagcaccgaaagttcctcgcggtgaccagcatgaataattcttgatgaagcatacaatccagacatgttagcatcagttaacgagaaaaaacagccaacatagcctttgggtataattatgcttaatcgtaagtatagcaaagccacccctcgcggatacaaagtaaaaggcacaggagaataaaaaatataattatttctctgctgctgttcaggcaacgtcgcccccggtccctctaaatacacatacaaagcctcatcagccatggcttaccagacaaagtacagcgggcacacaaagcacaagctctaaagtgactctccaacctctccacaatatatatatacacaagccctaaactgacgtaatgggagtaaagtgtaaaaaatcccgccaaacccaacacacaccccgaaactgcgtcaccagggaaaagtacagtttcacttccgcaatcccaacaggcgtaacttcctctttctcacggtacgtgatatcccactaacttgcaacgtcattttcccacggtcgcaccgccccttttagccgttaaccccacagccaatcaccacacgatccacactttttaaaatcacctcatttacatattggcaccattccatctataaggtatattatatagataga

SEQ ID NO: 67 - protein, 643 aa, Artificial Sequence
  Sodium Iodide symporter (NIS) amino acid sequence
MEAVETGERPTFGAWDYGVFALMLLVSTGIGLWVGLARGGQRSAEDFFTGGRRLAALPVGLSLSASFMSAVQVLGVPSEAYRYGLKFLWMCLGQLLNSVLTALLFMPVFYRLGLTSTYEYLEMRFSRAVRLCGTLQYIVATMLYTGIVIYAPALILNQVTGLDIWASLLSTGIICTFYTAVGGMKAVVWTDVFQVVVMLSGFWVVLARGVMLVGGPRQVLTLAQNHSRINLMDFNPDPRSRYTFWTFVVGGTLVWLSMYGVNQAQVQRYVACRTEKQAKLALLINQVGLFLIVSSAACCGIVMFVFYTDCDPLLLGRISAPDQYMPLLVLDIFEDLPGVPGLFLACAYSGTLSTASTSINAMAAVTVEDLIKPRLRSLAPRKLVIISKGLSLIYGSACLTVAALSSLLGGGVLQGSFTVMGVISGPLLGAFILGMFLPACNTPGVLAGLGAGLALSLWVALGATLYPPSEQTMRVLPSSAARCVALSVNASGLLDPALLPANDSSRAPSSGMDASRPALADSFYAISYLYYGALGTLTTVLCGALISCLTGPTKRSTLAPGLLWWDLARQTASVAPKEEVAILDDNLVKGPEELPTGNKKPPGFLPTNEDRLFFLGQKELEGAGSWTPCVGHDGGRDQQETNL

SEQ ID NO: 68 - DNA, 34558 bp, Artificial Sequence
  NG-280 virus genome sequence consisting of a transgene cassette encoding the sodium iodide symporter (NIS) inserted into the region BY
tctatctatataatataccttatagatggaatggtgccaatatgtaaatgaggtgattttaaaaagtgtggatcgtgtggtgattggctgtggggttaacggctaaaaggggcggtgcgaccgtgggaaaatgacgttttgtgggggtggagtttttttgcaagttgtcgcgggaaatgtgacgcataaaaaggcttttttctcacggaactacttagttttcccacggtatttaacaggaaatgaggtagttttgaccggatgcaagtgaaaattgttgattttcgcgcgaaaactgaatgaggaagtgtttttctgaataatgtggtatttatggcagggtggagtatttgttcagggccaggtagactttgacccattacgtggaggtttcgattaccgtgttttttacctgaatttccgcgtaccgtgtcaaagtcttctgtttttacgtaggtgtcagctgatcgctagggtatttatacctcagggtttgtgtcaagaggccactcttgagtgccagcgagaagagttttctcctctgcgccggcagtttaataataaaaaaatgagagatttgcgatttctgcctcaggaaataatctctgctgagactggaaatgaaatattggagcttgtggtgcacgccctgatgggagacgatccggagccacctgtgcagctttttgagcctcctacgcttcaggaactgtatgatttagaggtagagggatcggaggattctaatgaggaagctgtaaatggcttttttaccgattctatgcttttagctgctaatgaagggttagaattagatccgcctttggacacttttgatactccaggggtaattgtggaaagcggtacaggtgtaagaaaattacctgatttgagttccgtggactgtgatttgcactgctatgaagacgggtttcctccgagtgatgaggaggaccatgaaaaggagcagtccatgcagactgcagcgggtgagggagtgaaggctgccaatgttggttttcagttggattgcccggagcttcctggacatggctgtaagtcttgtgaatttcacaggaaaaatactggagtaaaggaactgttatgttcgctttgttatatgagaacgcactgccactttatttacagtaagtgtgtttaagttaaaatttaaaggaatatgctgtttttcacatgtatattgagtgtgagttttgtgcttcttattataggtcctgtgtctgatgctgatgaatcaccatctcctgattctactacctcacctcctgagattcaagcacctgttcctgtggacgtgcgcaagcccattcctgtgaagcttaagcctgggaaacgtccagcagtggaaaaacttgaggacttgttacagggtggggacggacctttggacttgagtacacggaaacgtccaagacaataagtgttccatatccgtgtttacttaaggtgacgtcaatatttgtgtgacagtgcaatgtaataaaaatatgttaactgttcactggtttttattgctttttgggcggggactcaggtatataagtagaagcagacctgtgtggttagctcataggagctggctttcatccatggaggtttgggccattttggaagaccttaggaagactaggcaactgttagagaacgcttcggacggagtctccggtttttggagattctggttcgctagtgaattagctagggtagtttttaggataaaacaggactataaacaagaatttgaaaagttgttggtagattgcccaggactttttgaagctcttaatttgggccatcaggttcactttaaagaaaaagttttatcagttttagacttttcaaccccaggtagaactgctgctgctgtggcttttcttacttttatattagataaatggatcccgcagactcatttcagcaggggatacgttttggatttcatagccacagcattgtggagaacatggaaggttcgcaagatgaggacaatcttaggttactggccagtgcagcctttgggtgtagcgggaatcctgaggcatccaccggtcatgccagcggttctggaggaggaacagcaagaggacaacccgagagccggcctggaccctccagtggaggaggcggagtagctgacttgtctcctgaactgcaacgggtgcttactggatctacgtccactggacgggataggggcgttaagagggagagggcatctagtggtactgatgctagatctgagttggctttaagtttaatgagtcgcagacgtcctgaaaccatttggtggcatgaggttcagaaagagggaagggatgaagtttctgtattgcaggagaaatattcactggaacaggtgaaaacatgttggttggagcctgaggatgattgggaggtggccattaaaaattatgccaagatagctttgaggcctgataaacagtataagattactagacggattaatatccggaatgcttgttacatatctggaaatggggctgaggtggtaatagatactcaagacaaggcagttattagatgctgcatgatggatatgtggcctggggtagtcggtatggaagcagtaacttttgtaaatgttaagtttaggggagatggttataatggaatagtgtttatggccaataccaaacttatattgcatggttgtagcttttttggtttcaacaatacctgtgtagatgcctggggacaggttagtgtacggggatgtagtttctatgcgtgttggattgccacagctggcagaaccaagagtcaattgtctctgaagaaatgcatatttcaaagatgtaacctgggcattctgaatgaaggcgaagcaagggtccgccactgcgcttctacagatactggatgttttattttgattaagggaaatgccagcgtaaagcataacatgatttgcggtgcttccgatgagaggccttatcaaatgctcacttgtgctggtgggcattgtaatatgctggctactgtgcatattgtttcccatcaacgcaaaaaatggcctgtttttgatcacaatgtgatgacgaagtgtaccatgcatgcaggtgggcgtagaggaatgtttatgccttaccagtgtaacatgaatcatgtgaaagtgttgttggaaccagatgccttttccagaatgagcctaacaggaatttttgacatgaacatgcaaatctggaagatcctgaggtatgatgatacgagatcgagggtacgcgcatgcgaatgcggaggcaagcatgccaggttccagccggtgtgtgtagatgtgactgaagatctcagaccggatcatttggttattgcccgcactggagcagagttcggatccagtggagaagaaactgactaaggtgagtattgggaaaactttggggtgggattttcagatggacagattgagtaaaaatttgttttttctgtcttgcagctgtcatgagtggaaacgcttcttttaaggggggagtcttcagcccttatctgacagggcgtctcccatcctgggcaggagttcgtcagaatgttatgggatctactgtggatggaagacccgtccaacccgccaattcttcaacgctgacctatgctactttaagttcttcacctttggacgcagctgcagctgccgccgccgcttctgttgccgctaacactgtgcttggaatgggttactatggaagcatcatggctaattccacttcctctaataacccttctaccctgactcaggacaagttacttgtccttttggcccagctggaggctttgacccaacgtctgggtgaactttctcagcaggtggtcgagttgcgagtacaaactgagtctgctgtcggcacggcaaagtctaaataaaaaaatcccagaatcaatgaataaataaacaagcttgttgttgatttaaaatcaagtgtttttatttcatttttcgcgcacggtatgccctagaccaccgatctctatcattgagaactcggtggattttttccaggatcctatagaggtgggattgaatgtttagatacatgggcattaggccgtctttggggtggagatagctccattgaagggattcatgctccggggtagtgttgtaaatcacccagtcataacaaggtcgcagtgcatggtgttgcacaatatcttttagaagtaggctgattgccacagataagcccttggtgtaggtgtttacaaaccggttgagctgggatgggtgcattcggggtgaaattatgtgcattttggattggatttttaagttggcaatattgccgccaagatcccgtcttgggttcatgttatgaaggaccaccaagacggtgtatccggtacatttaggaaatttatcgtgcagcttggatggaaaagcgtggaaaaatttggagacacccttgtgtcctccaagattttccatgcactcatccatgataatagcaatggggccgtgggcagcggcgcgggcaaacacgttccgtgggtctgacacatcatagttatgttcctgagttaaatcatcataagccattttaatgaatttggggcggagagtaccagattggggtatgaatgttccttcgggccccggagcatagttcccctcacagatttgcatttcccaagctttcagttccgagggtggaatcatgtccacctggggggctatgaaaaacaccgtttctggggcgggggtgattaattgtgatgatagcaaatttctgagcaattgagatttgccacatccggtggggccataaatgattccgattacgggttgcaggtggtagtttagggaacggcaactgccgtcttctcgaagcaagggggccacctcgttcatcatttcccttacatgcatattttcccgcaccaaatccattaggaggcgctctcctcctagtgatagaagttcttgtagtgaggaaaagtttttcagcggtttcagaccgtcagccatgggcattttggagagagtttgctgcaaaagttctagtctgttccacagttcagtgatgtgttctatggcatctcgatccagcagacctcctcgtttcgcgggtttggacggctcctggaatagggtatgagacgatgggcgtccagcgctgccagggttcggtccttccagggtctcagtgttcgagtcagggttgtttccgtcacagtgaaggggtgtgcgcctgcttgggcgcttgccagggtgcgcttcagactcatcctgctggtcgaaaacttctgtcgcttggcgccctgtatgtcggccaagtagcagtttaccatgagttcgtagttgagcgcctcggctgcgtggcctttggcgcggagcttacctttggaagttttcttgcataccgggcagtataggcatttcagcgcatacaacttgggcgcaaggaaaacggattctggggagtatgcatctgcgccgcaggaggcgcaaacagtttcacattccaccagccaggttaaatccggttcattggggtcaaaaacaagttttccgccatattttttgatgcgtttcttacctttggtctccatgagttcgtgtcctcgttgagtgacaaacaggctgtccgtgtccccgtagactgattttacaggcctcttctccagtggagtgcctcggtcttcttcgtacaggaactctgaccactctgatacaaaggcgcgcgtccaggccagcacaaaggaggctatgtgggaggggtagcgatcgttgtcaaccagggggtccaccttttccaaagtatgcaaacacatgtcaccctcttcaacatccaggaatgtgattggcttgtaggtgtatttcacgtgacctggggtccccgctgggggggtataaaagggggcggttctttgctcttcctcactgtcttccggatcgctgtccaggaacgtcagctgttggggtaggtattccctctcgaaggcgggcatgacctctgcactcaggttgtcagtttctaagaacgaggaggatttgatattgacagtgccggttgagatgcctttcatgaggttttcgtccatctggtcagaaaacacaatttttttattgtcaagtttggtggcaaatgatccatacagggcgttggataaaagtttggcaatggatcgcatggtttggttcttttccttgtccgcgcgctctttggcggcgatgttgagttggacatactcgcgtgccaggcacttccattcggggaagatagttgttaattcatctggcacgattctcacttgccaccctcgattatgcaaggtaattaaatccacactggtggccacctcgcctcgaaggggttcattggtccaacagagcctacctcctttcctagaacagaaagggggaagtgggtctagcataagttcatcgggagggtctgcatccatggtaaagattcccggaagtaaatccttatcaaaatagctgatgggagtggggtcatctaaggccatttgccattctcgagctgccagtgcgcgctcatatgggttaaggggactgccccatggcatgggatgggtgagtgcagaggcatacatgccacagatgtcatagacgtagatgggatcctcaaagatgcctatgtaggttggatagcatcgcccccctctgatacttgctcgcacatagtcatatagttcatgtgatggcgctagcagccccggacccaagttggtgcgattgggtttttctgttctgtagacgatctggcgaaagatggcgtgagaattggaagagatggtgggtctttgaaaaatgttgaaatgggcatgaggtagacctacagagtctctgacaaagtgggcataagattcttgaagcttggttaccagttcggcggtgacaagtacgtctagggcgcagtagtcaagtgtttcttgaatgatgtcataacctggttggtttttcttttcccacagttcgcggttgagaaggtattcttcgcgatccttccagtactcttctagcggaaacccgtctttgtctgcacggtaagatcctagcatgtagaactgattaactgccttgtaagggcagcagcccttctctacgggtagagagtatgcttgagcagcttttcgtagcgaagcgtgagtaagggcaaaggtgtctctgaccatgactttgaggaattggtatttgaagtcgatgtcgtcacaggctccctgttcccagagttggaagtctacccgtttcttgtaggcggggttgggcaaagcgaaagtaacatcattgaagagaatcttgccggccctgggcatgaaattgcgagtgatgcgaaaaggctgtggtacttccgctcggttattgataacctgggcagctaggacgatctcgtcgaaaccgttgatgttgtgtcctacgatgtataattctatgaaacgcggcgtgcctctgacgtgaggtagcttactgagctcatcaaaggttaggtctgtggggtcagataaggcgtagtgttcgagagcccattcgtgcaggtgaggattcgctttaaggaaggaggaccagaggtccactgccagtgctgtttgtaactggtcccggtactgacgaaaatgccgtccgactgccattttttctggggtgacgcaatagaaggtttgggggtcctgccgccagcgatcccacttgagttttatggcgaggtcataggcgatgttgacgagccgctggtctccagagagtttcatgaccagcatgaaggggattagctgcttgccaaaggaccccatccaggtgtaggtttccacatcgtaggtgagaaagagcctttctgtgcgaggatgagagccaatcgggaagaactggatctcctgccaccagttggaggaatggctgttgatgtgatggaagtagaactccctgcgacgcgccgagcattcatgcttgtgcttgtacagacggccgcagtagtcgcagcgttgcacgggttgtatctcgtgaatgagttgtacctggcttcccttgacgagaaatttcagtgggaagccgaggcctggcgattgtatctcgtgctttactatgttgtctgcatcggcctgttcatcttctgtctcgatggtggtcatgctgacgagccctcgcgggaggcaagtccagacctcggcgcggcaggggcggagctcgaggacgagagcgcgcaggctggagctgtccagggtcctgagacgctgcggactcaggttagtaggcagtgtcaggagattaacttgcatgatcttttggagggcgtgcgggaggttcagatagtacttgatctcaacgggtccgttggtggagatgtcgatggcttgcagggttccgtgtcccttgggcgctaccaccgtgcccttgtttttcattttggacggcggtggctctgttgcttcttgcatgtttagaagcggtgtcgagggcgcgcaccgggcggcaggggcggctcgggacccggcggcatggctggcagtggtacgtcggcgccgcgcgcgggtaggttctggtactgcgccctgagaagactcgcatgcgcgacgacgcggcggttgacatcctggatctgacgcctctgggtgaaagctaccggccccgtgagcttgaacctgaaagagagttcaacagaatcaatctcggtatcgttgacggcggcttgcctaaggatttcttgcacgtcaccagagttgtcctggtaggcgatctccgccatgaactgctcgatctcttcctcttgaagatctccgcggcccgctctctcgacggtggccgcgaggtcgttggagatgcgcccaatgagttgagagaatgcattcatgcccgcctcgttccagacgcggctgtagaccacggcccccacgggatctctcgcgcgcatgaccacctgggcgaggttgagctccacgtggcgggtgaagaccgcatagttgcataggcgctggaaaaggtagttgagtgtggtggcgatgtgctcggtgacgaagaaatacatgatccatcgtctcagcggcatctcgctgacatcgcccagagcttccaagcgctccatggcctcgtagaagtccacggcaaaattaaaaaactgggagtttcgcgcggacacggtcaactcctcttccagaagacggataagttcggcgatggtggtgcgcacctcgcgctcgaaagcccctgggatttcttcctcaatctcttcttcttccactaacatctcttcctcttcaggtggggctgcaggaggagggggaacgcggcgacgccggcggcgcacgggcagacggtcgatgaatctttcaatgacctctccgcggcggcggcgcatggtttcagtgacggcgcggccgttctcgcgcggtcgcagagtaaaaacaccgccgcgcatctccttaaagtggtgactgggaggttctccgtttgggagggagagggcgctgattatacattttattaattggcccgtagggactgcacgcagagatctgatcgtgtcaagatccacgggatctgaaaacctttcgacgaaagcgtctaaccagtcacagtcacaaggtaggctgagtacggcttcttgtgggcgggggtggttatgtgttcggtctgggtcttctgtttcttcttcatctcgggaaggtgagacgatgctgctggtgatgaaattaaagtaggcagttctaagacggcggatggtggcgaggagcaccaggtctttgggtccggcttgctggatacgcaggcgattggccattccccaagcattatcctgacatctagcaagatctttgtagtagtcttgcatgagccgttctacgggcacttcttcctcacccgttctgccatgcatacgtgtgagtccaaatccgcgcattggttgtaccagtgccaagtcagctacgactctttcggcgaggatggcttgctgtacttgggtaagggtggcttgaaagtcatcaaaatccacaaagcggtggtaagctcctgtattaatggtgtaagcacagttggccatgactgaccagttaactgtctggtgaccagggcgcacgagctcggtgtatttaaggcgcgaataggcgcgggtgtcaaagatgtaatcgttgcaggtgcgcaccagatactggtaccctataagaaaatgcggcggtggttggcggtagagaggccatcgttctgtagctggagcgccaggggcgaggtcttccaacataaggcggtgatagccgtagatgtacctggacatccaggtgattcctgcggcggtagtagaagcccgaggaaactcgcgtacgcggttccaaatgttgcgtagcggcatgaagtagttcattgtaggcacggtttgaccagtgaggcgcgcgcagtcattgatgctctatagacacggagaaaatgaaagcgttcagcgactcgactccgtagcctggaggaacgtgaacgggttgggtcgcggtgtaccccggttcgagacttgtactcgagccggccggagccgcggctaacgtggtattggcactcccgtctcgacccagcctacaaaaatccaggatacggaatcgagtcgttttgctggtttccgaatggcagggaagtgagtcctattttttttttttgccgctcagatgcatcccgtgctgcgacagatgcgcccccaacaacagcccccctcgcagcagcagcagcagcaatcacaaaaggctgtccctgcaactactgcaactgccgccgtgagcggtgcgggacagcccgcctatgatctggacttggaagagggcgaaggactggcacgtctaggtgcgccttcacccgagcggcatccgcgagttcaactgaaaaaagattctcgcgaggcgtatgtgccccaacagaacctatttagagacagaagcggcgaggagccggaggagatgcgagcttcccgctttaacgcgggtcgtgagctgcgtcacggtttggaccgaagacgagtgttgcgggacgaggatttcgaagttgatgaaatgacagggatcagtcctgccagggcacacgtggctgcagccaaccttgtatcggcttacgagcagacagtaaaggaagagcgtaacttccaaaagtcttttaataatcatgtgcgaaccctgattgcccgcgaagaagttacccttggtttgatgcatttgtgggatttgatggaagctatcattcagaaccctactagcaaacctctgaccgcccagctgtttctggtggtgcaacacagcagagacaatgaggctttcagagaggcgctgctgaacatcaccgaacccgaggggagatggttgtatgatcttatcaacattctacagagtatcatagtgcaggagcggagcctgggcctggccgagaaggtggctgccatcaattactcggttttgagcttgggaaaatattacgctcgcaaaatctacaagactccatacgttcccatagacaaggaggtgaagatagatgggttctacatgcgcatgacgctcaaggtcttgaccctgagcgatgatcttggggtgtatcgcaatgacagaatgcatcgcgcggttagcgccagcaggaggcgcgagttaagcgacagggaactgatgcacagtttgcaaagagctctgactggagctggaaccgagggtgagaattacttcgacatgggagctgacttgcagtggcagcctagtcgcagggctctgagcgccgcgacggcaggatgtgagcttccttacatagaagaggcggatgaaggcgaggaggaagagggcgagtacttggaagactgatggcacaacccgtgttttttgctagatggaacagcaagcaccggatcccgcaatgcgggcggcgctgcagagccagccgtccggcattaactcctcggacgattggacccaggccatgcaacgtatcatggcgttgacgactcgcaaccccgaagcctttagacagcaaccccaggccaaccgtctatcggccatcatggaagctgtagtgccttcccgctctaatcccactcatgagaaggtcctggccatcgtgaacgcgttggtggagaacaaagctattcgtccagatgaggccggactggtatacaacgctctcttagaacgcgtggctcgctacaacagtagcaatgtgcaaaccaatttggaccgtatgataacagatgtacgcgaagccgtgtctcagcgcgaaaggttccagcgtgatgccaacctgggttcgctggtggcgttaaatgctttcttgagtactcagcctgctaatgtgccgcgtggtcaacaggattatactaactttttaagtgctttgagactgatggtatcagaagtacctcagagcgaagtgtatcagtccggtcctgattacttctttcagactagcagacagggcttgcagacggtaaatctgagccaagcttttaaaaaccttaaaggtttgtggggagtgcatgccccggtaggagaaagagcaaccgtgtctagcttgttaactccgaactcccgcctattattactgttggtagctcctttcaccgacagcggtagcatcgaccgtaattcctatttgggttacctactaaacctgtatcgcgaagccatagggcaaagtcaggtggacgagcagacctatcaagaaattacccaagtcagtcgcgctttgggacaggaagacactggcagtttggaagccactctgaacttcttgcttaccaatcggtctcaaaagatccctcctcaatatgctcttactgcggaggaggagaggatccttagatatgtgcagcagagcgtgggattgtttctgatgcaagagggggcaactccgactgcagcactggacatgacagcgcgaaatatggagcccagcatgtatgccagtaaccgacctttcattaacaaactgctggactacttgcacagagctgccgctatgaactctgattatttcaccaatgccatcttaaacccgcactggctgcccccacctggtttctacacgggcgaatatgacatgcccgaccctaatgacggatttctgtgggacgacgtggacagcgatgttttttcacctctttctgatcatcgcacgtggaaaaaggaaggcggcgatagaatgcattcttctgcatcgctgtccggggtcatgggtgctaccgcggctgagcccgagtctgcaagtccttttcctagtctacccttttctctacacagtgtacgtagcagcgaagtgggtagaataagtcgcccgagtttaatgggcgaagaggagtatctaaacgattccttgctcagaccggcaagagaaaaaaatttcccaaacaatggaatagaaagtttggtggataaaatgagtagatggaagacttatgctcaggatcacagagacgagcctgggatcatggggattacaagtagagcgagccgtagacgccagcgccatgacagacagaggggtcttgtgtgggacgatgaggattcggccgatgatagcagcgtgctggacttgggtgggagaggaaggggcaacccgtttgctcatttgcgccctcgcttgggtggtatgttgtaaaaaaaaataaaaaaaaaactcaccaaggccatggcgacgagcgtacgttcgttcttctttattatctgtgtctagtataatgaggcgagtcgtgctaggcggagcggtggtgtatccggagggtcctcctccttcgtacgagagcgtgatgcagcagcagcaggcgacggcggtgatgcaatccccactggaggctccctttgtgcctccgcgatacctggcacctacggagggcagaaacagcattcgttattcggaactggcacctcagtacgataccaccaggttgtatctggtggacaacaagtcggcggacattgcttctctgaactatcagaatgaccacagcaacttcttgaccacggtggtgcaaaacaatgactttacccctacggaagccagcacccagaccattaactttgatgaacgatcgcggtggggcggtcagctaaagaccatcatgcatactaacatgccaaacgtgaacgagtatatgtttagtaacaagttcaaagcgcgtgtgatggtgtccagaaaacctcccgacggtgctgcagttggggatacttatgatcacaagcaggatattttgaaatatgagtggttcgagtttactttgccagaaggcaacttttcagttactatgactattgatttgatgaacaatgccatcatagataattacttgaaagtgggtagacagaatggagtgcttgaaagtgacattggtgttaagttcgacaccaggaacttcaagctgggatgggatcccgaaaccaagttgatcatgcctggagtgtatacgtatgaagccttccatcctgacattgtcttactgcctggctgcggagtggattttaccgagagtcgtttgagcaaccttcttggtatcagaaaaaaacagccatttcaagagggttttaagattttgtatgaagatttagaaggtggtaatattccggccctcttggatgtagatgcctatgagaacagtaagaaagaacaaaaagccaaaatagaagctgctacagctgctgcagaagctaaggcaaacatagttgccagcgactctacaagggttgctaacgctggagaggtcagaggagacaattttgcgccaacacctgttccgactgcagaatcattattggccgatgtgtctgaaggaacggacgtgaaactcactattcaacctgtagaaaaagatagtaagaatagaagctataatgtgttggaagacaaaatcaacacagcctatcgcagttggtatctttcgtacaattatggcgatcccgaaaaaggagtgcgttcctggacattgctcaccacctcagatgtcacctgcggagcagagcaggtctactggtcgcttccagacatgatgaaggatcctgtcactttccgctccactagacaagtcagtaactaccctgtggtgggtgcagagcttatgcccgtcttctcaaagagcttctacaacgaacaagctgtgtactcccagcagctccgccagtccacctcgcttacgcacgtcttcaaccgctttcctgagaaccagattttaatccgtccgccggcgcccaccattaccaccgtcagtgaaaacgttcctgctctcacagatcacgggaccctgccgttgcgcagcagtatccggggagtccaacgtgtgaccgttactgacgccagacgccgcacctgtccctacgtgtacaaggcactgggcatagtcgcaccgcgcgtcctttcaagccgcactttctaaaaaaaaaaaaaatgtccattcttatctcgcccagtaataacaccggttggggtctgcgcgctccaagcaagatgtacggaggcgcacgcaaacgttctacccaacatcctgtccgtgttcgcggacattttcgcgctccatggggcgccctcaagggccgcactcgcgttcgaaccaccgtcgatgatgtaatcgatcaggtggttgccgacgcccgtaattatactcctactgcgcctacatctactgtggatgcagttattgacagtgtagtggctgacgctcgcaactatgctcgacgtaagagccggcgaaggcgcattgccagacgccaccgagctaccactgccatgcgagccgcaagagctctgctacgaagagctagacgcgtggggcgaagagccatgcttagggcggccagacgtgcagcttcgggcgccagcgccggcaggtcccgcaggcaagcagccgctgtcgcagcggcgactattgccgacatggcccaatcgcgaagaggcaatgtatactgggtgcgtgacgctgccaccggtcaacgtgtacccgtgcgcacccgtccccctcgcacttagaagatactgagcagtctccgatgttgtgtcccagcggcgaggatgtccaagcgcaaatacaaggaagaaatgctgcaggttatcgcacctgaagtctacggccaaccgttgaaggatgaaaaaaaaccccgcaaaatcaagcgggttaaaaaggacaaaaaagaagaggaagatggcgatgatgggctggcggagtttgtgcgcgagtttgccccacggcgacgcgtgcaatggcgtgggcgcaaagttcgacatgtgttgagacctggaacttcggtggtctttacacccggcgagcgttcaagcgctacttttaagcgttcctatgatgaggtgtacggggatgatgatattcttgagcaggcggctgaccgattaggcgagtttgcttatggcaagcgtagtagaataacttccaaggatgagacagtgtcgatacccttggatcatggaaatcccacccctagtcttaaaccggtcactttgcagcaagtgttacccgtaactccgcgaacaggtgttaaacgcgaaggtgaagatttgtatcccactatgcaactgatggtacccaaacgccagaagttggaggacgttttggagaaagtaaaagtggatccagatattcaacctgaggttaaagtgagacccattaagcaggtagcgcctggtctgggggtacaaactgtagacattaagattcccactgaaagtatggaagtgcaaactgaacccgcaaagcctactgccacctccactgaagtgcaaacggatccatggatgcccatgcctattacaactgacgccgccggtcccactcgaagatcccgacgaaagtacggtccagcaagtctgttgatgcccaattatgttgtacacccatctattattcctactcctggttaccgaggcactcgctactatcgcagccgaaacagtacctcccgccgtcgccgcaagacacctgcaaatcgcagtcgtcgccgtagacgcacaagcaaaccgactcccggcgccctggtgcggcaagtgtaccgcaatggtagtgcggaacctttgacactgccgcgtgcgcgttaccatccgagtatcatcacttaatcaatgttgccgctgcctccttgcagatatggccctcacttgtcgccttcgcgttcccatcactggttaccgaggaagaaactcgcgccgtagaagagggatgttgggacgcggaatgcgacgctacaggcgacggcgtgctatccgcaagcaattgcggggtggttttttaccagccttaattccaattatcgctgctgcaattggcgcgataccaggcatagcttccgtggcggttcaggcctcgcaacgacattgacattggaaaaaaacgtataaataaaaaaaaaaaaatacaatggactctgacactcctggtcctgtgactatgttttcttagagatggaagacatcaatttttcatccttggctccgcgacacggcacgaagccgtacatgggcacctggagcgacatcggcacgagccaactgaacgggggcgccttcaattggagcagtatctggagcgggcttaaaaattttggctcaaccataaaaacatacgggaacaaagcttggaacagcagtacaggacaggcgcttagaaataaacttaaagaccagaacttccaacaaaaagtagtcgatgggatagcttccggcatcaatggagtggtagatttggctaaccaggctgtgcagaaaaagataaacagtcgtttggacccgccgccagcaaccccaggtgaaatgcaagtggaggaagaaattcctccgccagaaaaacgaggcgacaagcgtccgcgtcccgatttggaagagacgctggtgacgcgcgtagatgaaccgccttcttatgaggaagcaacgaagcttggaatgcccaccactagaccgatagccccaatggccaccggggtgatgaaaccttctcagttgcatcgacccgtcaccttggatttgccccctccccctgctgctactgctgtacccgcttctaagcctgtcgctgccccgaaaccagtcgccgtagccaggtcacgtcccgggggcgctcctcgtccaaatgcgcactggcaaaatactctgaacagcatcgtgggtctaggcgtgcaaagtgtaaaacgccgtcgctgcttttaattaaatatggagtagcgcttaacttgcctatctgtgtatatgtgtcattacacgccgtcacagcagcagaggaaaaaaggaagaggtcgtgcgtcgacgctgagttactttcaagatggccaccccatcgatgctgccccaatgggcatacatgcacatcgccggacaggatgcttcggagtacctgagtccgggtctggtgcagttcgcccgcgccacagacacctacttcaatctgggaaataagtttagaaatcccaccgtagcgccgacccacgatgtgaccaccgaccgtagccagcggctcatgttgcgcttcgtgcccgttgaccgggaggacaatacatactcttacaaagtgcggtacaccctggccgtgggcgacaacagagtgctggatatggccagcacgttctttgacattaggggtgtgttggacagaggtcccagtttcaaaccctattctggtacggcttacaactccctggctcctaaaggcgctccaaatacatctcagtggattgcagaaggtgtaaaaaatacaactggtgaggaacacgtaacagaagaggaaaccaatactactacttacacttttggcaatgctcctgtaaaagctgaagctgaaattacaaaagaaggactcccagtaggtttggaagtttcagatgaagaaagtaaaccgatttatgctgataaaacatatcagccagaacctcagctgggagatgaaacttggactgaccttgatggaaaaaccgaaaagtatggaggcagggctctcaaacccgatactaagatgaaaccatgctacgggtcctttgccaaacctactaatgtgaaaggcggtcaggcaaaacaaaaaacaacggagcagccaaatcagaaagtcgaatatgatatcgacatggagttttttgatgcggcatcgcagaaaacaaacttaagtcctaaaattgtcatgtatgcagaaaatgtaaatttggaaactccagacactcatgtagtgtacaaacctggaacagaagacacaagttccgaagctaatttgggacaacaatctatgcccaacagacccaactacattggcttcagagataactttattggacttatgtactataacagtactggtaacatgggggtgctggctggtcaagcgtctcagttaaatgcagtggttgacttgcaggacagaaacacagaactttcttaccaactcttgcttgactctctgggcgacagaaccagatactttagcatgtggaatcaggctgtggacagttatgatcctgatgtacgtgttattgaaaatcatggtgtggaagatgaacttcccaactactgttttccactggacggcataggtgttccaacaaccagttacaaatcaatagttccaaatggagacaatgcgcctaattggaaggaacctgaagtaaatggaacaagtgagatcggacagggtaatttgtttgccatggaaattaaccttcaagccaatctatggcgaagtttcctttattccaatgtggctctatatctcccagactcgtacaaatacaccccgtccaatgtcactcttccagaaaacaaaaacacctacgactacatgaacgggcgggtggtgccgccatctctagtagacacctatgtgaacattggtgccaggtggtctctggatgccatggacaatgtcaacccattcaaccaccaccgtaacgctggcttgcgttaccgatccatgcttctgggtaacggacgttatgtgcctttccacatacaagtgcctcaaaaattcttcgctgttaaaaacctgctgcttctcccaggctcctacacttatgagtggaactttaggaaggatgtgaacatggttctacagagttccctcggtaacgacctgcgggtagatggcgccagcatcagtttcacgagcatcaacctctatgctacttttttccccatggctcacaacaccgcttccacccttgaagccatgctgcggaatgacaccaatgatcagtcattcaacgactacctatctgcagctaacatgctctaccccattcctgccaatgcaaccaatattcccatttccattccttctcgcaactgggcggctttcagaggctggtcatttaccagactgaaaaccaaagaaactccctctttggggtctggatttgacccctactttgtctattctggttctattccctacctggatggtaccttctacctgaaccacacttttaagaaggtttccatcatgtttgactcttcagtgagctggcctggaaatgacaggttactatctcctaacgaatttgaaataaagcgcactgtggatggcgaaggctacaacgtagcccaatgcaacatgaccaaagactggttcttggtacagatgctcgccaactacaacatcggctatcagggcttctacattccagaaggatacaaagatcgcatgtattcatttttcagaaacttccagcccatgagcaggcaggtggttgatgaggtcaattacaaagacttcaaggccgtcgccataccctaccaacacaacaactctggctttgtgggttacatggctccgaccatgcgccaaggtcaaccctatcccgctaactatccctatccactcattggaacaactgccgtaaatagtgttacgcagaaaaagttcttgtgtgacagaaccatgtggcgcataccgttctcgagcaacttcatgtctatgggggcccttacagacttgggacagaatatgctctatgccaactcagctcatgctctggacatgacctttgaggtggatcccatggatgagcccaccctgctttatcttctcttcgaagttttcgacgtggtcagagtgcatcagccacaccgcggcatcatcgaggcagtctacctgcgtacaccgttctcggccggtaacgctaccacgtaagaagcttcttgcttcttgcaaatagcagctgcaaccatggcctgcggatcccaaaacggctccagcgagcaagagctcagagccattgtccaagacctgggttgcggaccctattttttgggaacctacgataagcgcttcccggggttcatggcccccgataagctcgcctgtgccattgtaaatacggccggacgtgagacggggggagagcactggttggctttcggttggaacccacgttctaacacctgctacctttttgatccttttggattctcggatgatcgtctcaaacagatttaccagtttgaatatgagggtctcctgcgccgcagcgctcttgctaccaaggaccgctgtattacgctggaaaaatctacccagaccgtgcagggtccccgttctgccgcctgcggacttttctgctgcatgttccttcacgcctttgtgcactggcctgaccgtcccatggacggaaaccccaccatgaaattgctaactggagtgccaaacaacatgcttcattctcctaaagtccagcccaccctgtgtgacaatcaaaaagcactctaccattttcttaatacccattcgccttattttcgctcccatcgtacacacatcgaaagggccactgcgttcgaccgtatggatgttcaataatgactcatgtaaacaacgtgttcaataaacatcactttatttttttacatgtatcaaggctctgcattacttatttatttacaagtcgaatgggttctgacgagaatcagaatgacccgcaggcagtgatacgttgcggaactgatacttgggttgccacttgaattcgggaatcaccaacttgggaaccggtatatcgggcaggatgtcactccacagctttctggtcagctgcaaagctccaagcaggtcaggagccgaaatcttgaaatcacaattaggaccagtgctttgagcgcgagagttgcggtacaccggattgcagcactgaaacaccatcagcgacggatgtctcacgcttgccagcacggtgggatctgcaatcatgcccacatccagatcttcagcattggcaatgctgaacggggtcatcttgcaggtctgcctacccatggcgggcacccaattaggcttgtggttgcaatcgcagtgcagggggatcagtatcatcttggcctgatcctgtctgattcctggatacacggctctcatgaaagcatcatattgcttgaaagcctgctgggctttactaccctcggtataaaacatcccgcaggacctgctcgaaaactggttagctgcacagccggcatcattcacacagcagcgggcgtcattgttagctatttgcaccacacttctgccccagcggttttgggtgattttggttcgctcgggattctcctttaaggctcgttgtccgttctcgctggccacatccatctcgataatctgctccttctgaatcataatattgccatgcaggcacttcagcttgccctcataatcattgcagccatgaggccacaacgcacagcctgtacattcccaattatggtgggcgatctgagaaaaagaatgtatcattccctgcagaaatcttcccatcatcgtgctcagtgtcttgtgactagtgaaagttaactggatgcctcggtgctcctcgtttacgtactggtgacagatgcgcttgtattgttcgtgttgctcaggcattagtttaaaagaggttctaagttcgttatccagcctgtacttctccatcagcagacacatcacttccatgcctttctcccaagcagacaccaggggcaagctaatcggattcttaacagtgcaggcagcagctcctttagccagagggtcatctttagcgatcttctcaatgcttcttttgccatccttctcaacgatgcgcacgggcgggtagctgaaacccactgctacaagttgcgcctcttctctttcttcttcgctgtcttgactgatgtcttgcatggggatatgtttggtcttccttggcttctttttggggggtatcggaggaggaggactgtcgctccgttccggagacagggaggattgtgacgtttcgctcaccattaccaactgactgtcggtagaagaacctgaccccacacggcgacaggtgtttctcttcgggggcagaggtggaggcgattgcgaagggctgcggtccgacctggaaggcggatgactggcagaaccccttccgcgttcgggggtgtgctccctgtggcggtcgcttaactgatttccttcgcggctggccattgtgttctcctaggcagagaaacaacagacatggaaactcagccattgctgtcaacatcgccacgagtgccatcacatctcgtcctcagcgacgaggaaaaggagcagagcttaagcattccaccgcccagtcctgccaccacctctaccctagaagataaggaggtcgacgcatctcatgacatgcagaataaaaaagcgaaagagtctgagacagacatcgagcaagacccgggctatgtgacaccggtggaacacgaggaagagttgaaacgctttctagagagagaggatgaaaactgcccaaaacaacgagcagataactatcaccaagatgctggaaatagggatcagaacaccgactacctcatagggcttgacggggaagacgcgctccttaaacatctagcaagacagtcgctcatagtcaaggatgcattattggacagaactgaagtgcccatcagtgtggaagagctcagccgcgcctacgagcttaacctcttttcacctcgtactccccccaaacgtcagccaaacggcacctgcgagccaaatcctcgcttaaacttttatccagcttttgctgtgccagaagtactggctacctatcacatcttttttaaaaatcaaaaaattccagtctcctgccgcgctaatcgcacccgcgccgatgccctactcaatctgggacctggttcacgcttacctgatatagcttccttggaagaggttccaaagatcttcgagggtctgggcaataatgagactcgggccgcaaatgctctgcaaaagggagaaaatggcatggatgagcatcacagcgttctggtggaattggaaggcgataatgccagactcgcagtactcaagcgaagcatcgaggtcacacacttcgcatatcccgctgtcaacctgccccctaaagtcatgacggcggtcatggaccagttactcattaagcgcgcaagtcccctttcagaagacatgcatgacccagatgcctgtgatgagggtaaaccagtggtcagtgatgagcagctaacccgatggctgggcaccgactctcccagggatttggaagagcgtcgcaagcttatgatggccgtggtgctggttaccgtagaactagagtgtctccgacgtttctttaccgattcagaaaccttgcgcaaactcgaagagaatctgcactacacttttagacacggctttgtgcggcaggcatgcaagatatctaacgtggaactcaccaacctggtttcctacatgggtattctgcatgagaatcgcctaggacaaagcgtgctgcacagcaccctgaagggggaagcccgccgtgattacatccgcgattgtgtctatctgtacctgtgccacacgtggcaaaccggcatgggtgtatggcagcaatgtttagaagaacagaacttgaaagagcttgacaagctcttacagaaatctcttaaggttctgtggacagggttcgacgagcgcaccgtcgcttccgacctggcagacctcatcttcccagagcgtctcagggttactttgcgaaacggattgcctgactttatgagccagagcatgcttaacaattttcgctctttcatcctggaacgctccggtatcctgcccgccacctgctgcgcactgccctccgactttgtgcctctcacctaccgcgagtgccccccgccgctatggagtcactgctacctgttccgtctggccaactatctctcctaccactcggatgtgatcgaggatgtgagcggagacggcttgctggagtgtcactgccgctgcaatctgtgcacgccccaccggtccctagcttgcaacccccagttgatgagcgaaacccagataataggcacctttgaattgcaaggccccagcagccaaggcgatgggtcttctcctgggcaaagtttaaaactgaccccgggactgtggacctccgcctacttgcgcaagtttgctccggaagattaccacccctatgaaatcaagttctatgaggaccaatcacagcctccaaaggccgaactttcggcctgcgtcatcacccagggggcaattctggcccaattgcaagccatccaaaaatcccgccaagaatttctactgaaaaagggtaagggggtctaccttgacccccagaccggcgaggaactcaacacaaggttccctcaggatgtcccaacgacgagaaaacaagaagttgaaggtgcagccgccgcccccagaagatatggaggaagattgggacagtcaggcagaggaggcggaggaggacagtctggaggacagtctggaggaagacagtttggaggaggaaaacgaggaggcagaggaggtggaagaagtaaccgccgacaaacagttatcctcggctgcggagacaagcaacagcgctaccatctccgctccgagtcgaggaacccggcggcgtcccagcagtagatgggacgagaccggacgcttcccgaacccaaccagcgcttccaagaccggtaagaaggatcggcagggatacaagtcctggcgggggcataagaatgccatcatctcctgcttgcatgagtgcgggggcaacatatccttcacgcggcgctacttgctattccaccatggggtgaactttccgcgcaatgttttgcattactaccgtcacctccacagcccctactatagccagcaaatcccggcagtctcgacagataaagacagcggcggcgacctccaacagaaaaccagcagcggcagttagaaaatacacaacaagtgcagcaacaggaggattaaagattacagccaacgagccagcgcaaacccgagagttaagaaatcggatctttccaaccctgtatgccatcttccagcagagtcggggtcaagagcaggaactgaaaataaaaaaccgatctctgcgttcgctcaccagaagttgtttgtatcacaagagcgaagatcaacttcagcgcactctcgaggacgccgaggctctcttcaacaagtactgcgcgctgactcttaaagagtaggcagcgaccgcgcttattcaaaaaaggcgggaattacatcatcctcgacatgagtaaagaaattcccacgccttacatgtggagttatcaaccccaaatgggattggcggcaggcgcctcccaggactactccacccgcatgaattggctcagcgccgggccttctatgatttctcgagttaatgatatacgcgcctaccgaaaccaaatacttttggaacagtcagctcttaccaccacgccccgccaacaccttaatcccagaaattggcccgccgccctagtgtaccaggaaagtcccgctcccaccactgtattacttcctcgagacgcccaggccgaagtccaaatgactaatgcaggtgcgcagttagctggcggctccaccctatgtcgtcacaggcctcggcataatataaaacgcctgatgatcagaggccgaggtatccagctcaacgacgagtcggtgagctctccgcttggtctacgaccagacggaatctttcagattgccggctgcgggagatcttccttcacccctcgtcaggctgttctgactttggaaagttcgtcttcgcaaccccgctcgggcggaatcgggaccgttcaatttgtggaggagtttactccctctgtctacttcaaccccttctccggatctcctgggcattacccggacgagttcataccgaacttcgacgcgattagcgagtcagtggacggctacgattgatgtctggtgacgcggctgagctatctcggctgcgacatctagaccactgccgccgctttcgctgctttgcccgggaactcattgagttcatctacttcgaactccccaaggatcaccctcaaggtccggcccacggagtgcggatttctatcgaaggcaaaatagactctcgcctgcaacgaattttctcccagcggcccgtgctgatcgagcgagaccagggaaacaccacggtttccatctactgcatttgtaatcaccccggattgcatgaaagcctttgctgtcttatgtgtactgagtttaataaaaactgaattaagactctcctacggactgccgcttcttcaacccggattttacaaccagaagaacgaaacttttcctgtcgtccaggactctgttaacttcacctttcctactcacaaactagaagctcaacgactacaccgcttttccagaagcattttccctactaatactactttcaaaaccggaggtgagctccaaggtcttcctacagaaaacccttgggtggaagcgggccttgtagtgctaggaattcttgcgggtgggcttgtgattattctttgctacctatacacaccttgcttcactttcttagtggtgttgtggtattggtttaaaaaatggggcccatactagtcttgcttgttttactttcgcttttggaaccgggttctgccaattacgatccatgtctagacttcgacccagaaaactgcacacttacttttgcacccgacacaagccgcatctgtggagttcatcgcctctcttacgaacttggcccccaacgacaaaaatttacctgcatggtgggaatcaaccccatagttatcacccagcaaagtggagatactaagggttgcattcactgctcctgcgattccatcgagtgcacctacaccctgctgaagaccctatgcggcctaagagacctgctaccaatgaattaaaaaatgattaataaaaaatcacttacttgaaatcagcaataaggtctctgttgaaattttctcccagcagcacctcacttccctcttcccaactctggtattctaaaccccgttcagcggcatactttctccatactttaaaggggatgtcaaattttagctcctctcctgtacccacaatcttcatgtctttcttcccagatgaccaagagagtccggctcagtgactccttcaaccctgtctacccctatgaagatgaaagcacctcccaacacccctttataaacccagggtttatttccccaaatggcttcacacaaagcccaaacggagttcttactttaaaatgtttaaccccactaacaaccacaggcggatctctacagctaaaagtgggagggggacttacagtggatgacaccaacggttttttgaaagaaaacataagtgccaccacaccactcgttaagactggtcactctataggtttaccactaggagccggattgggaacgaatgaaaataaactttgtatcaaattaggacaaggacttacattcaattcaaacaacatttgcattgatgacaatattaacaccttatggacaggagtcaaccccaccgaagccaactgtcaaatcatgaactccagtgaatctaatgattgcaaattaattctaacactagttaaaactggagcactagtcactgcatttgtttatgttataggagtatctaacaattttaatatgctaactacacacagaaatataaattttactgcagagctgtttttcgattctactggtaatttactaactagactctcatccctcaaaactccacttaatcataaatcaggacaaaacatggctactggtgccattactaatgctaaaggtttcatgcccagcacgactgcctatcctttcaatgataattctagagaaaaagaaaactacatttacggaacttgttactacacagctagtgatcgcactgcttttcccattgacatatctgtcatgcttaaccgaagagcaataaatgacgagacatcatattgtattcgtataacttggtcctggaacacaggagatgccccagaggtgcaaacctctgctacaaccctagtcacctccccatttaccttttactacatcagagaagacgactgacaaataaagtttgcgatcgccaggcccaccatggaggccgtggagaccggggaacggcccaccttcggagcctgggactacggggtctttgccctcatgctcctggtgtccactggcatcgggctgtgggtcgggctggctcggggcgggcagcgcagcgctgaggacttcttcaccgggggccggcgcctggcggccctgcccgtgggcctgtcgctgtctgccagcttcatgtcggccgtgcaggtgctgggcgtgccgtcggaggcctatcgctatggcctcaagttcctctggatgtgcctgggccagcttctgaactcggtcctcaccgccctgctcttcatgcccgtcttctaccgcctgggcctcaccagcacctacgagtacctggagatgcgcttcagccgcgcagtgcggctctgcgggactttgcagtacattgtagccacgatgctgtacaccggcatcgtaatctacgcaccggccctcatcctgaaccaagtgaccgggctggacatctgggcgtcgctcctgtccaccggaattatctgcaccttctacacggctgtgggcggcatgaaggctgtggtctggactgatgtgttccaggtcgtggtgatgctaagtggcttctgggttgtcctggcacgcggtgtcatgcttgtgggcgggccccgccaggtgctcacgctggcccagaaccactcccggatcaacctcatggactttaaccctgacccgaggagccgctatacattctggacttttgtggtgggtggcacgttggtgtggctctccatgtatggcgtgaaccaggcgcaggtgcagcgctacgtggcttgccgcacagagaagcaggccaagctggccctgctcatcaaccaggtcggcctgttcctgatcgtgtccagcgctgcctgctgtggcatcgtcatgtttgtgttctacactgactgcgaccctctcctcctggggcgcatctctgccccagaccagtacatgcctctgctggtgctggacatcttcgaagatctgcctggagtccccgggcttttcctggcctgtgcttacagtggcaccctcagcacagcatccaccagcatcaatgctatggctgcagtcactgtagaagacctcatcaaacctcggctgcggagcctggcacccaggaaactcgtgattatctccaaggggctctcactcatctacggatcggcctgtctcaccgtggcagccctgtcctcactgctcggaggaggtgtccttcagggctccttcaccgtcatgggagtcatcagcggccccctgctgggagccttcatcttgggaatgttcctgccggcctgcaacacaccgggcgtcctcgcgggactaggcgcgggcttggcgctgtcgctgtgggtggccttgggcgccacgctgtacccacccagcgagcagaccatgagggtcctgccatcgtcggctgcccgctgcgtggctctctcagtcaacgcctctggcctcctggacccggctctcctccctgctaacgactccagcagggcccccagctcaggaatggacgccagccgacccgccttagctgacagcttctatgccatctcctatctctattacggtgccctgggcacgctgaccactgtgctgtgcggagccctcatcagctgcctgacaggccccaccaagcgcagcaccctggccccgggattgttgtggtgggacctcgcacggcagacagcatcagtggcccccaaggaagaagtggccatcctggatgacaacttggtcaagggtcctgaagaactccccactggaaacaagaagccccctggcttcctgcccaccaatgaggatcgtctgtttttcttggggcagaaggagctggagggggctggctcttggaccccctgtgttggacatgatggtggtcgagaccagcaggagacaaacctctgagctagcttgactgactgagatacagcgtaccttcagctcacagacatgataagatacattgatgagtttggacaaaccacaactagaatgcagtgaaaaaaatgctttatttgtgaaatttgtgatgctattgctttatttgtaaccattataagctgcaataaacaagttaacaacaacaattgcattcattttatgtttcaggttcagggggaggtgtgggaggttttttaaagcaagtaaaacctctacaaatgtggtagtcgtcagctatcctgcaggaacttgtttatttgaaaatcaattcacaaaatccgagtagttattttgcctcccccttcccatttaacagaatacaccaatctctccccacgcacagctttaaacatttggataccattagatatagacatggttttagattccacattccaaacagtttcagagcgagccaatctggggtcagtgatagataaaaatccatcgggatagtcttttaaagcgctttcacagtccaactgctgcggatgcgactccggagtctggatcacggtcatctggaagaagaacgatgggaatcataatccgaaaacggtatcggacgattgtgtctcatcaaacccacaagcagccgctgtctgcgtcgctccgtgcgactgctgtttatgggatcagggtccacagtgtcctgaagcatgattttaatagcccttaacatcaactttctggtgcgatgcgcgcagcaacgcattctgatttcactcaaatctttgcagtaggtacaacacattattacaatattgtttaataaaccataattaaaagcgctccagccaaaactcatatctgatataatcgcccctgcatgaccatcataccaaagtttaatataaattaaatgacgttccctcaaaaacacactacccacatacatgatctcttttggcatgtgcatattaacaatctgtctgtaccatggacaacgttggttaatcatgcaacccaatataaccttccggaaccacactgccaacaccgctcccccagccatgcattgaagtgaaccctgctgattacaatgacaatgaagaacccaattctctcgaccgtgaatcacttgagaatgaaaaatatctatagtggcacaacatagacataaatgcatgcatcttctcataatttttaactcctcaggatttagaaacatatcccagggaataggaagctcttgcagaacagtaaagctggcagaacaaggaagaccacgaacacaacttacactatgcatagtcatagtatcacaatctggcaacagcgggtggtcttcagtcatagaagctcgggtttcattttcctcacaacgtggtaactgggctctggtgtaagggtgatgtctggcgcatgatgtcgagcgtgcgcgcaaccttgtcataatggagttgcttcctgacattctcgtattttgtatagcaaaacgcggccctggcagaacacactcttcttcgccttctatcctgccgcttagcgtgttccgtgtgatagttcaagtacaaccacactcttaagttggtcaaaagaatgctggcttcagttgtaatcaaaactccatcgcatctaatcgttctgaggaaatcatccaagcaatgcaactggattgtgtttcaagcaggagaggagagggaagagacggaagaaccatgttaatttttattccaaacgatctcgcagtacttcaaattgtagatcgcgcagatggcatctctcgcccccactgtgttggtgaaaaagcacagctagatcaaaagaaatgcgattttcaaggtgctcaacggtggcttccagcaaagcctccacgcgcacatccaagaacaaaagaataccaaaagaaggagcattttctaactcctcaatcatcatattacattcctgcaccattcccagataattttcagctttccagccttgaattattcgtgtcagttcttgtggtaaatccaatccacacattacaaacaggtcccggagggcgccctccaccaccattcttaaacacaccctcataatgacaaaatatcttgctcctgtgtcacctgtagcgaattgagaatggcaacatcaattgacatgcccttggctctaagttcttctttaagttctagttgtaaaaactctctcatattatcaccaaactgcttagccagaagccccccgggaacaagagcaggggacgctacagtgcagtacaagcgcagacctccccaattggctccagcaaaaacaagattggaataagcatattgggaaccgccagtaatatcatcgaagttgctggaaatataatcaggcagagtttcttgtaaaaattgaataaaagaaaaatttgccaaaaaaacattcaaaacctctgggatgcaaatgcaataggttaccgcgctgcgctccaacattgttagttttgaattagtctgcaaaaataaaaaaaaaaacaagcgtcatatcatagtagcctgacgaacagatggataaatcagtctttccatcacaagacaagccacagggtctccagctcgaccctcgtaaaacctgtcatcatgattaaacaacagcaccgaaagttcctcgcggtgaccagcatgaataattcttgatgaagcatacaatccagacatgttagcatcagttaacgagaaaaaacagccaacatagcctttgggtataattatgcttaatcgtaagtatagcaaagccacccctcgcggatacaaagtaaaaggcacaggagaataaaaaatataattatttctctgctgctgttcaggcaacgtcgcccccggtccctctaaatacacatacaaagcctcatcagccatggcttaccagacaaagtacagcgggcacacaaagcacaagctctaaagtgactctccaacctctccacaatatatatatacacaagccctaaactgacgtaatgggagtaaagtgtaaaaaatcccgccaaacccaacacacaccccgaaactgcgtcaccagggaaaagtacagtttcacttccgcaatcccaacaggcgtaacttcctctttctcacggtacgtgatatcccactaacttgcaacgtcattttcccacggtcgcaccgccccttttagccgttaaccccacagccaatcaccacacgatccacactttttaaaatcacctcatttacatattggcaccattccatctataaggtatattatatagataga

SEQ ID NO: 69 - DNA, 34327 bp, Artificial Sequence
  NG-272 virus genome sequence comprising the EnAd genome with a transgene cassette encoding an anti-VEGF ScFv and an anti-PD-L1 ScFv inserted into the region BY.
tctatctatataatataccttatagatggaatggtgccaatatgtaaatgaggtgattttaaaaagtgtggatcgtgtggtgattggctgtggggttaacggctaaaaggggcggtgcgaccgtgggaaaatgacgttttgtgggggtggagtttttttgcaagttgtcgcgggaaatgtgacgcataaaaaggcttttttctcacggaactacttagttttcccacggtatttaacaggaaatgaggtagttttgaccggatgcaagtgaaaattgttgattttcgcgcgaaaactgaatgaggaagtgtttttctgaataatgtggtatttatggcagggtggagtatttgttcagggccaggtagactttgacccattacgtggaggtttcgattaccgtgttttttacctgaatttccgcgtaccgtgtcaaagtcttctgtttttacgtaggtgtcagctgatcgctagggtatttatacctcagggtttgtgtcaagaggccactcttgagtgccagcgagaagagttttctcctctgcgccggcagtttaataataaaaaaatgagagatttgcgatttctgcctcaggaaataatctctgctgagactggaaatgaaatattggagcttgtggtgcacgccctgatgggagacgatccggagccacctgtgcagctttttgagcctcctacgcttcaggaactgtatgatttagaggtagagggatcggaggattctaatgaggaagctgtaaatggcttttttaccgattctatgcttttagctgctaatgaagggttagaattagatccgcctttggacacttttgatactccaggggtaattgtggaaagcggtacaggtgtaagaaaattacctgatttgagttccgtggactgtgatttgcactgctatgaagacgggtttcctccgagtgatgaggaggaccatgaaaaggagcagtccatgcagactgcagcgggtgagggagtgaaggctgccaatgttggttttcagttggattgcccggagcttcctggacatggctgtaagtcttgtgaatttcacaggaaaaatactggagtaaaggaactgttatgttcgctttgttatatgagaacgcactgccactttatttacagtaagtgtgtttaagttaaaatttaaaggaatatgctgtttttcacatgtatattgagtgtgagttttgtgcttcttattataggtcctgtgtctgatgctgatgaatcaccatctcctgattctactacctcacctcctgagattcaagcacctgttcctgtggacgtgcgcaagcccattcctgtgaagcttaagcctgggaaacgtccagcagtggaaaaacttgaggacttgttacagggtggggacggacctttggacttgagtacacggaaacgtccaagacaataagtgttccatatccgtgtttacttaaggtgacgtcaatatttgtgtgacagtgcaatgtaataaaaatatgttaactgttcactggtttttattgctttttgggcggggactcaggtatataagtagaagcagacctgtgtggttagctcataggagctggctttcatccatggaggtttgggccattttggaagaccttaggaagactaggcaactgttagagaacgcttcggacggagtctccggtttttggagattctggttcgctagtgaattagctagggtagtttttaggataaaacaggactataaacaagaatttgaaaagttgttggtagattgcccaggactttttgaagctcttaatttgggccatcaggttcactttaaagaaaaagttttatcagttttagacttttcaaccccaggtagaactgctgctgctgtggcttttcttacttttatattagataaatggatcccgcagactcatttcagcaggggatacgttttggatttcatagccacagcattgtggagaacatggaaggttcgcaagatgaggacaatcttaggttactggccagtgcagcctttgggtgtagcgggaatcctgaggcatccaccggtcatgccagcggttctggaggaggaacagcaagaggacaacccgagagccggcctggaccctccagtggaggaggcggagtagctgacttgtctcctgaactgcaacgggtgcttactggatctacgtccactggacgggataggggcgttaagagggagagggcatctagtggtactgatgctagatctgagttggctttaagtttaatgagtcgcagacgtcctgaaaccatttggtggcatgaggttcagaaagagggaagggatgaagtttctgtattgcaggagaaatattcactggaacaggtgaaaacatgttggttggagcctgaggatgattgggaggtggccattaaaaattatgccaagatagctttgaggcctgataaacagtataagattactagacggattaatatccggaatgcttgttacatatctggaaatggggctgaggtggtaatagatactcaagacaaggcagttattagatgctgcatgatggatatgtggcctggggtagtcggtatggaagcagtaacttttgtaaatgttaagtttaggggagatggttataatggaatagtgtttatggccaataccaaacttatattgcatggttgtagcttttttggtttcaacaatacctgtgtagatgcctggggacaggttagtgtacggggatgtagtttctatgcgtgttggattgccacagctggcagaaccaagagtcaattgtctctgaagaaatgcatatttcaaagatgtaacctgggcattctgaatgaaggcgaagcaagggtccgccactgcgcttctacagatactggatgttttattttgattaagggaaatgccagcgtaaagcataacatgatttgcggtgcttccgatgagaggccttatcaaatgctcacttgtgctggtgggcattgtaatatgctggctactgtgcatattgtttcccatcaacgcaaaaaatggcctgtttttgatcacaatgtgatgacgaagtgtaccatgcatgcaggtgggcgtagaggaatgtttatgccttaccagtgtaacatgaatcatgtgaaagtgttgttggaaccagatgccttttccagaatgagcctaacaggaatttttgacatgaacatgcaaatctggaagatcctgaggtatgatgatacgagatcgagggtacgcgcatgcgaatgcggaggcaagcatgccaggttccagccggtgtgtgtagatgtgactgaagatctcagaccggatcatttggttattgcccgcactggagcagagttcggatccagtggagaagaaactgactaaggtgagtattgggaaaactttggggtgggattttcagatggacagattgagtaaaaatttgttttttctgtcttgcagctgtcatgagtggaaacgcttcttttaaggggggagtcttcagcccttatctgacagggcgtctcccatcctgggcaggagttcgtcagaatgttatgggatctactgtggatggaagacccgtccaacccgccaattcttcaacgctgacctatgctactttaagttcttcacctttggacgcagctgcagctgccgccgccgcttctgttgccgctaacactgtgcttggaatgggttactatggaagcatcatggctaattccacttcctctaataacccttctaccctgactcaggacaagttacttgtccttttggcccagctggaggctttgacccaacgtctgggtgaactttctcagcaggtggtcgagttgcgagtacaaactgagtctgctgtcggcacggcaaagtctaaataaaaaaatcccagaatcaatgaataaataaacaagcttgttgttgatttaaaatcaagtgtttttatttcatttttcgcgcacggtatgccctagaccaccgatctctatcattgagaactcggtggattttttccaggatcctatagaggtgggattgaatgtttagatacatgggcattaggccgtctttggggtggagatagctccattgaagggattcatgctccggggtagtgttgtaaatcacccagtcataacaaggtcgcagtgcatggtgttgcacaatatcttttagaagtaggctgattgccacagataagcccttggtgtaggtgtttacaaaccggttgagctgggatgggtgcattcggggtgaaattatgtgcattttggattggatttttaagttggcaatattgccgccaagatcccgtcttgggttcatgttatgaaggaccaccaagacggtgtatccggtacatttaggaaatttatcgtgcagcttggatggaaaagcgtggaaaaatttggagacacccttgtgtcctccaagattttccatgcactcatccatgataatagcaatggggccgtgggcagcggcgcgggcaaacacgttccgtgggtctgacacatcatagttatgttcctgagttaaatcatcataagccattttaatgaatttggggcggagagtaccagattggggtatgaatgttccttcgggccccggagcatagttcccctcacagatttgcatttcccaagctttcagttccgagggtggaatcatgtccacctggggggctatgaaaaacaccgtttctggggcgggggtgattaattgtgatgatagcaaatttctgagcaattgagatttgccacatccggtggggccataaatgattccgattacgggttgcaggtggtagtttagggaacggcaactgccgtcttctcgaagcaagggggccacctcgttcatcatttcccttacatgcatattttcccgcaccaaatccattaggaggcgctctcctcctagtgatagaagttcttgtagtgaggaaaagtttttcagcggtttcagaccgtcagccatgggcattttggagagagtttgctgcaaaagttctagtctgttccacagttcagtgatgtgttctatggcatctcgatccagcagacctcctcgtttcgcgggtttggacggctcctggaatagggtatgagacgatgggcgtccagcgctgccagggttcggtccttccagggtctcagtgttcgagtcagggttgtttccgtcacagtgaaggggtgtgcgcctgcttgggcgcttgccagggtgcgcttcagactcatcctgctggtcgaaaacttctgtcgcttggcgccctgtatgtcggccaagtagcagtttaccatgagttcgtagttgagcgcctcggctgcgtggcctttggcgcggagcttacctttggaagttttcttgcataccgggcagtataggcatttcagcgcatacaacttgggcgcaaggaaaacggattctggggagtatgcatctgcgccgcaggaggcgcaaacagtttcacattccaccagccaggttaaatccggttcattggggtcaaaaacaagttttccgccatattttttgatgcgtttcttacctttggtctccatgagttcgtgtcctcgttgagtgacaaacaggctgtccgtgtccccgtagactgattttacaggcctcttctccagtggagtgcctcggtcttcttcgtacaggaactctgaccactctgatacaaaggcgcgcgtccaggccagcacaaaggaggctatgtgggaggggtagcgatcgttgtcaaccagggggtccaccttttccaaagtatgcaaacacatgtcaccctcttcaacatccaggaatgtgattggcttgtaggtgtatttcacgtgacctggggtccccgctgggggggtataaaagggggcggttctttgctcttcctcactgtcttccggatcgctgtccaggaacgtcagctgttggggtaggtattccctctcgaaggcgggcatgacctctgcactcaggttgtcagtttctaagaacgaggaggatttgatattgacagtgccggttgagatgcctttcatgaggttttcgtccatctggtcagaaaacacaatttttttattgtcaagtttggtggcaaatgatccatacagggcgttggataaaagtttggcaatggatcgcatggtttggttcttttccttgtccgcgcgctctttggcggcgatgttgagttggacatactcgcgtgccaggcacttccattcggggaagatagttgttaattcatctggcacgattctcacttgccaccctcgattatgcaaggtaattaaatccacactggtggccacctcgcctcgaaggggttcattggtccaacagagcctacctcctttcctagaacagaaagggggaagtgggtctagcataagttcatcgggagggtctgcatccatggtaaagattcccggaagtaaatccttatcaaaatagctgatgggagtggggtcatctaaggccatttgccattctcgagctgccagtgcgcgctcatatgggttaaggggactgccccatggcatgggatgggtgagtgcagaggcatacatgccacagatgtcatagacgtagatgggatcctcaaagatgcctatgtaggttggatagcatcgcccccctctgatacttgctcgcacatagtcatatagttcatgtgatggcgctagcagccccggacccaagttggtgcgattgggtttttctgttctgtagacgatctggcgaaagatggcgtgagaattggaagagatggtgggtctttgaaaaatgttgaaatgggcatgaggtagacctacagagtctctgacaaagtgggcataagattcttgaagcttggttaccagttcggcggtgacaagtacgtctagggcgcagtagtcaagtgtttcttgaatgatgtcataacctggttggtttttcttttcccacagttcgcggttgagaaggtattcttcgcgatccttccagtactcttctagcggaaacccgtctttgtctgcacggtaagatcctagcatgtagaactgattaactgccttgtaagggcagcagcccttctctacgggtagagagtatgcttgagcagcttttcgtagcgaagcgtgagtaagggcaaaggtgtctctgaccatgactttgaggaattggtatttgaagtcgatgtcgtcacaggctccctgttcccagagttggaagtctacccgtttcttgtaggcggggttgggcaaagcgaaagtaacatcattgaagagaatcttgccggccctgggcatgaaattgcgagtgatgcgaaaaggctgtggtacttccgctcggttattgataacctgggcagctaggacgatctcgtcgaaaccgttgatgttgtgtcctacgatgtataattctatgaaacgcggcgtgcctctgacgtgaggtagcttactgagctcatcaaaggttaggtctgtggggtcagataaggcgtagtgttcgagagcccattcgtgcaggtgaggattcgctttaaggaaggaggaccagaggtccactgccagtgctgtttgtaactggtcccggtactgacgaaaatgccgtccgactgccattttttctggggtgacgcaatagaaggtttgggggtcctgccgccagcgatcccacttgagttttatggcgaggtcataggcgatgttgacgagccgctggtctccagagagtttcatgaccagcatgaaggggattagctgcttgccaaaggaccccatccaggtgtaggtttccacatcgtaggtgagaaagagcctttctgtgcgaggatgagagccaatcgggaagaactggatctcctgccaccagttggaggaatggctgttgatgtgatggaagtagaactccctgcgacgcgccgagcattcatgcttgtgcttgtacagacggccgcagtagtcgcagcgttgcacgggttgtatctcgtgaatgagttgtacctggcttcccttgacgagaaatttcagtgggaagccgaggcctggcgattgtatctcgtgctttactatgttgtctgcatcggcctgttcatcttctgtctcgatggtggtcatgctgacgagccctcgcgggaggcaagtccagacctcggcgcggcaggggcggagctcgaggacgagagcgcgcaggctggagctgtccagggtcctgagacgctgcggactcaggttagtaggcagtgtcaggagattaacttgcatgatcttttggagggcgtgcgggaggttcagatagtacttgatctcaacgggtccgttggtggagatgtcgatggcttgcagggttccgtgtcccttgggcgctaccaccgtgcccttgtttttcattttggacggcggtggctctgttgcttcttgcatgtttagaagcggtgtcgagggcgcgcaccgggcggcaggggcggctcgggacccggcggcatggctggcagtggtacgtcggcgccgcgcgcgggtaggttctggtactgcgccctgagaagactcgcatgcgcgacgacgcggcggttgacatcctggatctgacgcctctgggtgaaagctaccggccccgtgagcttgaacctgaaagagagttcaacagaatcaatctcggtatcgttgacggcggcttgcctaaggatttcttgcacgtcaccagagttgtcctggtaggcgatctccgccatgaactgctcgatctcttcctcttgaagatctccgcggcccgctctctcgacggtggccgcgaggtcgttggagatgcgcccaatgagttgagagaatgcattcatgcccgcctcgttccagacgcggctgtagaccacggcccccacgggatctctcgcgcgcatgaccacctgggcgaggttgagctccacgtggcgggtgaagaccgcatagttgcataggcgctggaaaaggtagttgagtgtggtggcgatgtgctcggtgacgaagaaatacatgatccatcgtctcagcggcatctcgctgacatcgcccagagcttccaagcgctccatggcctcgtagaagtccacggcaaaattaaaaaactgggagtttcgcgcggacacggtcaactcctcttccagaagacggataagttcggcgatggtggtgcgcacctcgcgctcgaaagcccctgggatttcttcctcaatctcttcttcttccactaacatctcttcctcttcaggtggggctgcaggaggagggggaacgcggcgacgccggcggcgcacgggcagacggtcgatgaatctttcaatgacctctccgcggcggcggcgcatggtttcagtgacggcgcggccgttctcgcgcggtcgcagagtaaaaacaccgccgcgcatctccttaaagtggtgactgggaggttctccgtttgggagggagagggcgctgattatacattttattaattggcccgtagggactgcacgcagagatctgatcgtgtcaagatccacgggatctgaaaacctttcgacgaaagcgtctaaccagtcacagtcacaaggtaggctgagtacggcttcttgtgggcgggggtggttatgtgttcggtctgggtcttctgtttcttcttcatctcgggaaggtgagacgatgctgctggtgatgaaattaaagtaggcagttctaagacggcggatggtggcgaggagcaccaggtctttgggtccggcttgctggatacgcaggcgattggccattccccaagcattatcctgacatctagcaagatctttgtagtagtcttgcatgagccgttctacgggcacttcttcctcacccgttctgccatgcatacgtgtgagtccaaatccgcgcattggttgtaccagtgccaagtcagctacgactctttcggcgaggatggcttgctgtacttgggtaagggtggcttgaaagtcatcaaaatccacaaagcggtggtaagctcctgtattaatggtgtaagcacagttggccatgactgaccagttaactgtctggtgaccagggcgcacgagctcggtgtatttaaggcgcgaataggcgcgggtgtcaaagatgtaatcgttgcaggtgcgcaccagatactggtaccctataagaaaatgcggcggtggttggcggtagagaggccatcgttctgtagctggagcgccaggggcgaggtcttccaacataaggcggtgatagccgtagatgtacctggacatccaggtgattcctgcggcggtagtagaagcccgaggaaactcgcgtacgcggttccaaatgttgcgtagcggcatgaagtagttcattgtaggcacggtttgaccagtgaggcgcgcgcagtcattgatgctctatagacacggagaaaatgaaagcgttcagcgactcgactccgtagcctggaggaacgtgaacgggttgggtcgcggtgtaccccggttcgagacttgtactcgagccggccggagccgcggctaacgtggtattggcactcccgtctcgacccagcctacaaaaatccaggatacggaatcgagtcgttttgctggtttccgaatggcagggaagtgagtcctattttttttttttgccgctcagatgcatcccgtgctgcgacagatgcgcccccaacaacagcccccctcgcagcagcagcagcagcaatcacaaaaggctgtccctgcaactactgcaactgccgccgtgagcggtgcgggacagcccgcctatgatctggacttggaagagggcgaaggactggcacgtctaggtgcgccttcacccgagcggcatccgcgagttcaactgaaaaaagattctcgcgaggcgtatgtgccccaacagaacctatttagagacagaagcggcgaggagccggaggagatgcgagcttcccgctttaacgcgggtcgtgagctgcgtcacggtttggaccgaagacgagtgttgcgggacgaggatttcgaagttgatgaaatgacagggatcagtcctgccagggcacacgtggctgcagccaaccttgtatcggcttacgagcagacagtaaaggaagagcgtaacttccaaaagtcttttaataatcatgtgcgaaccctgattgcccgcgaagaagttacccttggtttgatgcatttgtgggatttgatggaagctatcattcagaaccctactagcaaacctctgaccgcccagctgtttctggtggtgcaacacagcagagacaatgaggctttcagagaggcgctgctgaacatcaccgaacccgaggggagatggttgtatgatcttatcaacattctacagagtatcatagtgcaggagcggagcctgggcctggccgagaaggtggctgccatcaattactcggttttgagcttgggaaaatattacgctcgcaaaatctacaagactccatacgttcccatagacaaggaggtgaagatagatgggttctacatgcgcatgacgctcaaggtcttgaccctgagcgatgatcttggggtgtatcgcaatgacagaatgcatcgcgcggttagcgccagcaggaggcgcgagttaagcgacagggaactgatgcacagtttgcaaagagctctgactggagctggaaccgagggtgagaattacttcgacatgggagctgacttgcagtggcagcctagtcgcagggctctgagcgccgcgacggcaggatgtgagcttccttacatagaagaggcggatgaaggcgaggaggaagagggcgagtacttggaagactgatggcacaacccgtgttttttgctagatggaacagcaagcaccggatcccgcaatgcgggcggcgctgcagagccagccgtccggcattaactcctcggacgattggacccaggccatgcaacgtatcatggcgttgacgactcgcaaccccgaagcctttagacagcaaccccaggccaaccgtctatcggccatcatggaagctgtagtgccttcccgctctaatcccactcatgagaaggtcctggccatcgtgaacgcgttggtggagaacaaagctattcgtccagatgaggccggactggtatacaacgctctcttagaacgcgtggctcgctacaacagtagcaatgtgcaaaccaatttggaccgtatgataacagatgtacgcgaagccgtgtctcagcgcgaaaggttccagcgtgatgccaacctgggttcgctggtggcgttaaatgctttcttgagtactcagcctgctaatgtgccgcgtggtcaacaggattatactaactttttaagtgctttgagactgatggtatcagaagtacctcagagcgaagtgtatcagtccggtcctgattacttctttcagactagcagacagggcttgcagacggtaaatctgagccaagcttttaaaaaccttaaaggtttgtggggagtgcatgccccggtaggagaaagagcaaccgtgtctagcttgttaactccgaactcccgcctattattactgttggtagctcctttcaccgacagcggtagcatcgaccgtaattcctatttgggttacctactaaacctgtatcgcgaagccatagggcaaagtcaggtggacgagcagacctatcaagaaattacccaagtcagtcgcgctttgggacaggaagacactggcagtttggaagccactctgaacttcttgcttaccaatcggtctcaaaagatccctcctcaatatgctcttactgcggaggaggagaggatccttagatatgtgcagcagagcgtgggattgtttctgatgcaagagggggcaactccgactgcagcactggacatgacagcgcgaaatatggagcccagcatgtatgccagtaaccgacctttcattaacaaactgctggactacttgcacagagctgccgctatgaactctgattatttcaccaatgccatcttaaacccgcactggctgcccccacctggtttctacacgggcgaatatgacatgcccgaccctaatgacggatttctgtgggacgacgtggacagcgatgttttttcacctctttctgatcatcgcacgtggaaaaaggaaggcggcgatagaatgcattcttctgcatcgctgtccggggtcatgggtgctaccgcggctgagcccgagtctgcaagtccttttcctagtctacccttttctctacacagtgtacgtagcagcgaagtgggtagaataagtcgcccgagtttaatgggcgaagaggagtatctaaacgattccttgctcagaccggcaagagaaaaaaatttcccaaacaatggaatagaaagtttggtggataaaatgagtagatggaagacttatgctcaggatcacagagacgagcctgggatcatggggattacaagtagagcgagccgtagacgccagcgccatgacagacagaggggtcttgtgtgggacgatgaggattcggccgatgatagcagcgtgctggacttgggtgggagaggaaggggcaacccgtttgctcatttgcgccctcgcttgggtggtatgttgtaaaaaaaaataaaaaaaaaactcaccaaggccatggcgacgagcgtacgttcgttcttctttattatctgtgtctagtataatgaggcgagtcgtgctaggcggagcggtggtgtatccggagggtcctcctccttcgtacgagagcgtgatgcagcagcagcaggcgacggcggtgatgcaatccccactggaggctccctttgtgcctccgcgatacctggcacctacggagggcagaaacagcattcgttattcggaactggcacctcagtacgataccaccaggttgtatctggtggacaacaagtcggcggacattgcttctctgaactatcagaatgaccacagcaacttcttgaccacggtggtgcaaaacaatgactttacccctacggaagccagcacccagaccattaactttgatgaacgatcgcggtggggcggtcagctaaagaccatcatgcatactaacatgccaaacgtgaacgagtatatgtttagtaacaagttcaaagcgcgtgtgatggtgtccagaaaacctcccgacggtgctgcagttggggatacttatgatcacaagcaggatattttgaaatatgagtggttcgagtttactttgccagaaggcaacttttcagttactatgactattgatttgatgaacaatgccatcatagataattacttgaaagtgggtagacagaatggagtgcttgaaagtgacattggtgttaagttcgacaccaggaacttcaagctgggatgggatcccgaaaccaagttgatcatgcctggagtgtatacgtatgaagccttccatcctgacattgtcttactgcctggctgcggagtggattttaccgagagtcgtttgagcaaccttcttggtatcagaaaaaaacagccatttcaagagggttttaagattttgtatgaagatttagaaggtggtaatattccggccctcttggatgtagatgcctatgagaacagtaagaaagaacaaaaagccaaaatagaagctgctacagctgctgcagaagctaaggcaaacatagttgccagcgactctacaagggttgctaacgctggagaggtcagaggagacaattttgcgccaacacctgttccgactgcagaatcattattggccgatgtgtctgaaggaacggacgtgaaactcactattcaacctgtagaaaaagatagtaagaatagaagctataatgtgttggaagacaaaatcaacacagcctatcgcagttggtatctttcgtacaattatggcgatcccgaaaaaggagtgcgttcctggacattgctcaccacctcagatgtcacctgcggagcagagcaggtctactggtcgcttccagacatgatgaaggatcctgtcactttccgctccactagacaagtcagtaactaccctgtggtgggtgcagagcttatgcccgtcttctcaaagagcttctacaacgaacaagctgtgtactcccagcagctccgccagtccacctcgcttacgcacgtcttcaaccgctttcctgagaaccagattttaatccgtccgccggcgcccaccattaccaccgtcagtgaaaacgttcctgctctcacagatcacgggaccctgccgttgcgcagcagtatccggggagtccaacgtgtgaccgttactgacgccagacgccgcacctgtccctacgtgtacaaggcactgggcatagtcgcaccgcgcgtcctttcaagccgcactttctaaaaaaaaaaaaaatgtccattcttatctcgcccagtaataacaccggttggggtctgcgcgctccaagcaagatgtacggaggcgcacgcaaacgttctacccaacatcctgtccgtgttcgcggacattttcgcgctccatggggcgccctcaagggccgcactcgcgttcgaaccaccgtcgatgatgtaatcgatcaggtggttgccgacgcccgtaattatactcctactgcgcctacatctactgtggatgcagttattgacagtgtagtggctgacgctcgcaactatgctcgacgtaagagccggcgaaggcgcattgccagacgccaccgagctaccactgccatgcgagccgcaagagctctgctacgaagagctagacgcgtggggcgaagagccatgcttagggcggccagacgtgcagcttcgggcgccagcgccggcaggtcccgcaggcaagcagccgctgtcgcagcggcgactattgccgacatggcccaatcgcgaagaggcaatgtatactgggtgcgtgacgctgccaccggtcaacgtgtacccgtgcgcacccgtccccctcgcacttagaagatactgagcagtctccgatgttgtgtcccagcggcgaggatgtccaagcgcaaatacaaggaagaaatgctgcaggttatcgcacctgaagtctacggccaaccgttgaaggatgaaaaaaaaccccgcaaaatcaagcgggttaaaaaggacaaaaaagaagaggaagatggcgatgatgggctggcggagtttgtgcgcgagtttgccccacggcgacgcgtgcaatggcgtgggcgcaaagttcgacatgtgttgagacctggaacttcggtggtctttacacccggcgagcgttcaagcgctacttttaagcgttcctatgatgaggtgtacggggatgatgatattcttgagcaggcggctgaccgattaggcgagtttgcttatggcaagcgtagtagaataacttccaaggatgagacagtgtcgatacccttggatcatggaaatcccacccctagtcttaaaccggtcactttgcagcaagtgttacccgtaactccgcgaacaggtgttaaacgcgaaggtgaagatttgtatcccactatgcaactgatggtacccaaacgccagaagttggaggacgttttggagaaagtaaaagtggatccagatattcaacctgaggttaaagtgagacccattaagcaggtagcgcctggtctgggggtacaaactgtagacattaagattcccactgaaagtatggaagtgcaaactgaacccgcaaagcctactgccacctccactgaagtgcaaacggatccatggatgcccatgcctattacaactgacgccgccggtcccactcgaagatcccgacgaaagtacggtccagcaagtctgttgatgcccaattatgttgtacacccatctattattcctactcctggttaccgaggcactcgctactatcgcagccgaaacagtacctcccgccgtcgccgcaagacacctgcaaatcgcagtcgtcgccgtagacgcacaagcaaaccgactcccggcgccctggtgcggcaagtgtaccgcaatggtagtgcggaacctttgacactgccgcgtgcgcgttaccatccgagtatcatcacttaatcaatgttgccgctgcctccttgcagatatggccctcacttgtcgccttcgcgttcccatcactggttaccgaggaagaaactcgcgccgtagaagagggatgttgggacgcggaatgcgacgctacaggcgacggcgtgctatccgcaagcaattgcggggtggttttttaccagccttaattccaattatcgctgctgcaattggcgcgataccaggcatagcttccgtggcggttcaggcctcgcaacgacattgacattggaaaaaaacgtataaataaaaaaaaaaaaatacaatggactctgacactcctggtcctgtgactatgttttcttagagatggaagacatcaatttttcatccttggctccgcgacacggcacgaagccgtacatgggcacctggagcgacatcggcacgagccaactgaacgggggcgccttcaattggagcagtatctggagcgggcttaaaaattttggctcaaccataaaaacatacgggaacaaagcttggaacagcagtacaggacaggcgcttagaaataaacttaaagaccagaacttccaacaaaaagtagtcgatgggatagcttccggcatcaatggagtggtagatttggctaaccaggctgtgcagaaaaagataaacagtcgtttggacccgccgccagcaaccccaggtgaaatgcaagtggaggaagaaattcctccgccagaaaaacgaggcgacaagcgtccgcgtcccgatttggaagagacgctggtgacgcgcgtagatgaaccgccttcttatgaggaagcaacgaagcttggaatgcccaccactagaccgatagccccaatggccaccggggtgatgaaaccttctcagttgcatcgacccgtcaccttggatttgccccctccccctgctgctactgctgtacccgcttctaagcctgtcgctgccccgaaaccagtcgccgtagccaggtcacgtcccgggggcgctcctcgtccaaatgcgcactggcaaaatactctgaacagcatcgtgggtctaggcgtgcaaagtgtaaaacgccgtcgctgcttttaattaaatatggagtagcgcttaacttgcctatctgtgtatatgtgtcattacacgccgtcacagcagcagaggaaaaaaggaagaggtcgtgcgtcgacgctgagttactttcaagatggccaccccatcgatgctgccccaatgggcatacatgcacatcgccggacaggatgcttcggagtacctgagtccgggtctggtgcagttcgcccgcgccacagacacctacttcaatctgggaaataagtttagaaatcccaccgtagcgccgacccacgatgtgaccaccgaccgtagccagcggctcatgttgcgcttcgtgcccgttgaccgggaggacaatacatactcttacaaagtgcggtacaccctggccgtgggcgacaacagagtgctggatatggccagcacgttctttgacattaggggtgtgttggacagaggtcccagtttcaaaccctattctggtacggcttacaactccctggctcctaaaggcgctccaaatacatctcagtggattgcagaaggtgtaaaaaatacaactggtgaggaacacgtaacagaagaggaaaccaatactactacttacacttttggcaatgctcctgtaaaagctgaagctgaaattacaaaagaaggactcccagtaggtttggaagtttcagatgaagaaagtaaaccgatttatgctgataaaacatatcagccagaacctcagctgggagatgaaacttggactgaccttgatggaaaaaccgaaaagtatggaggcagggctctcaaacccgatactaagatgaaaccatgctacgggtcctttgccaaacctactaatgtgaaaggcggtcaggcaaaacaaaaaacaacggagcagccaaatcagaaagtcgaatatgatatcgacatggagttttttgatgcggcatcgcagaaaacaaacttaagtcctaaaattgtcatgtatgcagaaaatgtaaatttggaaactccagacactcatgtagtgtacaaacctggaacagaagacacaagttccgaagctaatttgggacaacaatctatgcccaacagacccaactacattggcttcagagataactttattggacttatgtactataacagtactggtaacatgggggtgctggctggtcaagcgtctcagttaaatgcagtggttgacttgcaggacagaaacacagaactttcttaccaactcttgcttgactctctgggcgacagaaccagatactttagcatgtggaatcaggctgtggacagttatgatcctgatgtacgtgttattgaaaatcatggtgtggaagatgaacttcccaactactgttttccactggacggcataggtgttccaacaaccagttacaaatcaatagttccaaatggagacaatgcgcctaattggaaggaacctgaagtaaatggaacaagtgagatcggacagggtaatttgtttgccatggaaattaaccttcaagccaatctatggcgaagtttcctttattccaatgtggctctatatctcccagactcgtacaaatacaccccgtccaatgtcactcttccagaaaacaaaaacacctacgactacatgaacgggcgggtggtgccgccatctctagtagacacctatgtgaacattggtgccaggtggtctctggatgccatggacaatgtcaacccattcaaccaccaccgtaacgctggcttgcgttaccgatccatgcttctgggtaacggacgttatgtgcctttccacatacaagtgcctcaaaaattcttcgctgttaaaaacctgctgcttctcccaggctcctacacttatgagtggaactttaggaaggatgtgaacatggttctacagagttccctcggtaacgacctgcgggtagatggcgccagcatcagtttcacgagcatcaacctctatgctacttttttccccatggctcacaacaccgcttccacccttgaagccatgctgcggaatgacaccaatgatcagtcattcaacgactacctatctgcagctaacatgctctaccccattcctgccaatgcaaccaatattcccatttccattccttctcgcaactgggcggctttcagaggctggtcatttaccagactgaaaaccaaagaaactccctctttggggtctggatttgacccctactttgtctattctggttctattccctacctggatggtaccttctacctgaaccacacttttaagaaggtttccatcatgtttgactcttcagtgagctggcctggaaatgacaggttactatctcctaacgaatttgaaataaagcgcactgtggatggcgaaggctacaacgtagcccaatgcaacatgaccaaagactggttcttggtacagatgctcgccaactacaacatcggctatcagggcttctacattccagaaggatacaaagatcgcatgtattcatttttcagaaacttccagcccatgagcaggcaggtggttgatgaggtcaattacaaagacttcaaggccgtcgccataccctaccaacacaacaactctggctttgtgggttacatggctccgaccatgcgccaaggtcaaccctatcccgctaactatccctatccactcattggaacaactgccgtaaatagtgttacgcagaaaaagttcttgtgtgacagaaccatgtggcgcataccgttctcgagcaacttcatgtctatgggggcccttacagacttgggacagaatatgctctatgccaactcagctcatgctctggacatgacctttgaggtggatcccatggatgagcccaccctgctttatcttctcttcgaagttttcgacgtggtcagagtgcatcagccacaccgcggcatcatcgaggcagtctacctgcgtacaccgttctcggccggtaacgctaccacgtaagaagcttcttgcttcttgcaaatagcagctgcaaccatggcctgcggatcccaaaacggctccagcgagcaagagctcagagccattgtccaagacctgggttgcggaccctattttttgggaacctacgataagcgcttcccggggttcatggcccccgataagctcgcctgtgccattgtaaatacggccggacgtgagacggggggagagcactggttggctttcggttggaacccacgttctaacacctgctacctttttgatccttttggattctcggatgatcgtctcaaacagatttaccagtttgaatatgagggtctcctgcgccgcagcgctcttgctaccaaggaccgctgtattacgctggaaaaatctacccagaccgtgcagggtccccgttctgccgcctgcggacttttctgctgcatgttccttcacgcctttgtgcactggcctgaccgtcccatggacggaaaccccaccatgaaattgctaactggagtgccaaacaacatgcttcattctcctaaagtccagcccaccctgtgtgacaatcaaaaagcactctaccattttcttaatacccattcgccttattttcgctcccatcgtacacacatcgaaagggccactgcgttcgaccgtatggatgttcaataatgactcatgtaaacaacgtgttcaataaacatcactttatttttttacatgtatcaaggctctgcattacttatttatttacaagtcgaatgggttctgacgagaatcagaatgacccgcaggcagtgatacgttgcggaactgatacttgggttgccacttgaattcgggaatcaccaacttgggaaccggtatatcgggcaggatgtcactccacagctttctggtcagctgcaaagctccaagcaggtcaggagccgaaatcttgaaatcacaattaggaccagtgctttgagcgcgagagttgcggtacaccggattgcagcactgaaacaccatcagcgacggatgtctcacgcttgccagcacggtgggatctgcaatcatgcccacatccagatcttcagcattggcaatgctgaacggggtcatcttgcaggtctgcctacccatggcgggcacccaattaggcttgtggttgcaatcgcagtgcagggggatcagtatcatcttggcctgatcctgtctgattcctggatacacggctctcatgaaagcatcatattgcttgaaagcctgctgggctttactaccctcggtataaaacatcccgcaggacctgctcgaaaactggttagctgcacagccggcatcattcacacagcagcgggcgtcattgttagctatttgcaccacacttctgccccagcggttttgggtgattttggttcgctcgggattctcctttaaggctcgttgtccgttctcgctggccacatccatctcgataatctgctccttctgaatcataatattgccatgcaggcacttcagcttgccctcataatcattgcagccatgaggccacaacgcacagcctgtacattcccaattatggtgggcgatctgagaaaaagaatgtatcattccctgcagaaatcttcccatcatcgtgctcagtgtcttgtgactagtgaaagttaactggatgcctcggtgctcctcgtttacgtactggtgacagatgcgcttgtattgttcgtgttgctcaggcattagtttaaaagaggttctaagttcgttatccagcctgtacttctccatcagcagacacatcacttccatgcctttctcccaagcagacaccaggggcaagctaatcggattcttaacagtgcaggcagcagctcctttagccagagggtcatctttagcgatcttctcaatgcttcttttgccatccttctcaacgatgcgcacgggcgggtagctgaaacccactgctacaagttgcgcctcttctctttcttcttcgctgtcttgactgatgtcttgcatggggatatgtttggtcttccttggcttctttttggggggtatcggaggaggaggactgtcgctccgttccggagacagggaggattgtgacgtttcgctcaccattaccaactgactgtcggtagaagaacctgaccccacacggcgacaggtgtttctcttcgggggcagaggtggaggcgattgcgaagggctgcggtccgacctggaaggcggatgactggcagaaccccttccgcgttcgggggtgtgctccctgtggcggtcgcttaactgatttccttcgcggctggccattgtgttctcctaggcagagaaacaacagacatggaaactcagccattgctgtcaacatcgccacgagtgccatcacatctcgtcctcagcgacgaggaaaaggagcagagcttaagcattccaccgcccagtcctgccaccacctctaccctagaagataaggaggtcgacgcatctcatgacatgcagaataaaaaagcgaaagagtctgagacagacatcgagcaagacccgggctatgtgacaccggtggaacacgaggaagagttgaaacgctttctagagagagaggatgaaaactgcccaaaacaacgagcagataactatcaccaagatgctggaaatagggatcagaacaccgactacctcatagggcttgacggggaagacgcgctccttaaacatctagcaagacagtcgctcatagtcaaggatgcattattggacagaactgaagtgcccatcagtgtggaagagctcagccgcgcctacgagcttaacctcttttcacctcgtactccccccaaacgtcagccaaacggcacctgcgagccaaatcctcgcttaaacttttatccagcttttgctgtgccagaagtactggctacctatcacatcttttttaaaaatcaaaaaattccagtctcctgccgcgctaatcgcacccgcgccgatgccctactcaatctgggacctggttcacgcttacctgatatagcttccttggaagaggttccaaagatcttcgagggtctgggcaataatgagactcgggccgcaaatgctctgcaaaagggagaaaatggcatggatgagcatcacagcgttctggtggaattggaaggcgataatgccagactcgcagtactcaagcgaagcatcgaggtcacacacttcgcatatcccgctgtcaacctgccccctaaagtcatgacggcggtcatggaccagttactcattaagcgcgcaagtcccctttcagaagacatgcatgacccagatgcctgtgatgagggtaaaccagtggtcagtgatgagcagctaacccgatggctgggcaccgactctcccagggatttggaagagcgtcgcaagcttatgatggccgtggtgctggttaccgtagaactagagtgtctccgacgtttctttaccgattcagaaaccttgcgcaaactcgaagagaatctgcactacacttttagacacggctttgtgcggcaggcatgcaagatatctaacgtggaactcaccaacctggtttcctacatgggtattctgcatgagaatcgcctaggacaaagcgtgctgcacagcaccctgaagggggaagcccgccgtgattacatccgcgattgtgtctatctgtacctgtgccacacgtggcaaaccggcatgggtgtatggcagcaatgtttagaagaacagaacttgaaagagcttgacaagctcttacagaaatctcttaaggttctgtggacagggttcgacgagcgcaccgtcgcttccgacctggcagacctcatcttcccagagcgtctcagggttactttgcgaaacggattgcctgactttatgagccagagcatgcttaacaattttcgctctttcatcctggaacgctccggtatcctgcccgccacctgctgcgcactgccctccgactttgtgcctctcacctaccgcgagtgccccccgccgctatggagtcactgctacctgttccgtctggccaactatctctcctaccactcggatgtgatcgaggatgtgagcggagacggcttgctggagtgtcactgccgctgcaatctgtgcacgccccaccggtccctagcttgcaacccccagttgatgagcgaaacccagataataggcacctttgaattgcaaggccccagcagccaaggcgatgggtcttctcctgggcaaagtttaaaactgaccccgggactgtggacctccgcctacttgcgcaagtttgctccggaagattaccacccctatgaaatcaagttctatgaggaccaatcacagcctccaaaggccgaactttcggcctgcgtcatcacccagggggcaattctggcccaattgcaagccatccaaaaatcccgccaagaatttctactgaaaaagggtaagggggtctaccttgacccccagaccggcgaggaactcaacacaaggttccctcaggatgtcccaacgacgagaaaacaagaagttgaaggtgcagccgccgcccccagaagatatggaggaagattgggacagtcaggcagaggaggcggaggaggacagtctggaggacagtctggaggaagacagtttggaggaggaaaacgaggaggcagaggaggtggaagaagtaaccgccgacaaacagttatcctcggctgcggagacaagcaacagcgctaccatctccgctccgagtcgaggaacccggcggcgtcccagcagtagatgggacgagaccggacgcttcccgaacccaaccagcgcttccaagaccggtaagaaggatcggcagggatacaagtcctggcgggggcataagaatgccatcatctcctgcttgcatgagtgcgggggcaacatatccttcacgcggcgctacttgctattccaccatggggtgaactttccgcgcaatgttttgcattactaccgtcacctccacagcccctactatagccagcaaatcccggcagtctcgacagataaagacagcggcggcgacctccaacagaaaaccagcagcggcagttagaaaatacacaacaagtgcagcaacaggaggattaaagattacagccaacgagccagcgcaaacccgagagttaagaaatcggatctttccaaccctgtatgccatcttccagcagagtcggggtcaagagcaggaactgaaaataaaaaaccgatctctgcgttcgctcaccagaagttgtttgtatcacaagagcgaagatcaacttcagcgcactctcgaggacgccgaggctctcttcaacaagtactgcgcgctgactcttaaagagtaggcagcgaccgcgcttattcaaaaaaggcgggaattacatcatcctcgacatgagtaaagaaattcccacgccttacatgtggagttatcaaccccaaatgggattggcggcaggcgcctcccaggactactccacccgcatgaattggctcagcgccgggccttctatgatttctcgagttaatgatatacgcgcctaccgaaaccaaatacttttggaacagtcagctcttaccaccacgccccgccaacaccttaatcccagaaattggcccgccgccctagtgtaccaggaaagtcccgctcccaccactgtattacttcctcgagacgcccaggccgaagtccaaatgactaatgcaggtgcgcagttagctggcggctccaccctatgtcgtcacaggcctcggcataatataaaacgcctgatgatcagaggccgaggtatccagctcaacgacgagtcggtgagctctccgcttggtctacgaccagacggaatctttcagattgccggctgcgggagatcttccttcacccctcgtcaggctgttctgactttggaaagttcgtcttcgcaaccccgctcgggcggaatcgggaccgttcaatttgtggaggagtttactccctctgtctacttcaaccccttctccggatctcctgggcattacccggacgagttcataccgaacttcgacgcgattagcgagtcagtggacggctacgattgatgtctggtgacgcggctgagctatctcggctgcgacatctagaccactgccgccgctttcgctgctttgcccgggaactcattgagttcatctacttcgaactccccaaggatcaccctcaaggtccggcccacggagtgcggatttctatcgaaggcaaaatagactctcgcctgcaacgaattttctcccagcggcccgtgctgatcgagcgagaccagggaaacaccacggtttccatctactgcatttgtaatcaccccggattgcatgaaagcctttgctgtcttatgtgtactgagtttaataaaaactgaattaagactctcctacggactgccgcttcttcaacccggattttacaaccagaagaacgaaacttttcctgtcgtccaggactctgttaacttcacctttcctactcacaaactagaagctcaacgactacaccgcttttccagaagcattttccctactaatactactttcaaaaccggaggtgagctccaaggtcttcctacagaaaacccttgggtggaagcgggccttgtagtgctaggaattcttgcgggtgggcttgtgattattctttgctacctatacacaccttgcttcactttcttagtggtgttgtggtattggtttaaaaaatggggcccatactagtcttgcttgttttactttcgcttttggaaccgggttctgccaattacgatccatgtctagacttcgacccagaaaactgcacacttacttttgcacccgacacaagccgcatctgtggagttcatcgcctctcttacgaacttggcccccaacgacaaaaatttacctgcatggtgggaatcaaccccatagttatcacccagcaaagtggagatactaagggttgcattcactgctcctgcgattccatcgagtgcacctacaccctgctgaagaccctatgcggcctaagagacctgctaccaatgaattaaaaaatgattaataaaaaatcacttacttgaaatcagcaataaggtctctgttgaaattttctcccagcagcacctcacttccctcttcccaactctggtattctaaaccccgttcagcggcatactttctccatactttaaaggggatgtcaaattttagctcctctcctgtacccacaatcttcatgtctttcttcccagatgaccaagagagtccggctcagtgactccttcaaccctgtctacccctatgaagatgaaagcacctcccaacacccctttataaacccagggtttatttccccaaatggcttcacacaaagcccaaacggagttcttactttaaaatgtttaaccccactaacaaccacaggcggatctctacagctaaaagtgggagggggacttacagtggatgacaccaacggttttttgaaagaaaacataagtgccaccacaccactcgttaagactggtcactctataggtttaccactaggagccggattgggaacgaatgaaaataaactttgtatcaaattaggacaaggacttacattcaattcaaacaacatttgcattgatgacaatattaacaccttatggacaggagtcaaccccaccgaagccaactgtcaaatcatgaactccagtgaatctaatgattgcaaattaattctaacactagttaaaactggagcactagtcactgcatttgtttatgttataggagtatctaacaattttaatatgctaactacacacagaaatataaattttactgcagagctgtttttcgattctactggtaatttactaactagactctcatccctcaaaactccacttaatcataaatcaggacaaaacatggctactggtgccattactaatgctaaaggtttcatgcccagcacgactgcctatcctttcaatgataattctagagaaaaagaaaactacatttacggaacttgttactacacagctagtgatcgcactgcttttcccattgacatatctgtcatgcttaaccgaagagcaataaatgacgagacatcatattgtattcgtataacttggtcctggaacacaggagatgccccagaggtgcaaacctctgctacaaccctagtcacctccccatttaccttttactacatcagagaagacgactgacaaataaagtttgcgatcgccaggcccaccatgggatggagctgcatcatactgttcctggttgccacagctacaggggtacactccgaagtccagctcgttgaaagcggaggcgggttggtccaacctggcggctcacttcggctttcctgtgcagctagtgggttcaccttttccgatagctggatacactgggtgagacaggctccaggcaaaggcttggaatgggtcgcctggattagcccctatggaggcagcacctattacgccgattctgtgaaggggaggttcacaatctccgccgataccagtaagaacacagcctatctgcagatgaatagtctccgagccgaggacactgcagtgtactactgcgctaggcgtcattggccaggaggctttgactactggggtcaaggtaccctcgtgactgtgagtgcaggtggcggtggctcgggcggtggtggatctggtggcggcggatctgacatccagatgacacagagccctagctcactgtctgcgagcgtaggcgacagagtgaccatcacttgtcgggcttcccaggatgtgtccacagccgttgcatggtaccagcagaaacccgggaaagcaccaaagctgctgatctacagcgcttctttcctgtactcaggcgtgcctagccgctttagtgggtctggttctgggactgacttcaccctcacgatttcctcactgcaacccgaggattttgcgacctattactgccagcagtatctgtatcatccggccacttttgggcaaggcacgaaggtcgagattaagcgccatcatcaccaccaccacggaagcggagctactaacttcagcctgctgaagcaggctggagacgtggaggagaaccctggacctggttggtcgtgtataatcctatttctcgtagcaactgcgactggcgtccatagtgaggttcagctggtggagtctggcggtggcctggtgcagccagggggttcactccgtttgtcttgtgcggcttctggctataccttcaccaactatggtatgaactgggtccgtcaggccccgggtaagggcctggagtgggttggatggattaacacctataccggtgaaccgacctatgctgcggatttcaaacgtcgttttactttttctctggacacctccaagagcacagcttacctccagatgaacagcctgcgcgctgaggacactgccgtctattactgtgcaaagtacccgcactattatgggagcagccactggtatttcgacgtctggggacaaggaaccctggtcaccgtctcctcgggaggtggtggaagtgggggcggcggtagcggagggggtggtagcgatatacaaatgacccagtccccgtctagcctgtccgcctctgtgggcgatagggtcaccatcacctgcagcgcaagtcaggatattagcaactatttaaactggtatcaacagaaaccaggaaaagctccgaaagtcctgatttacttcacctcctctctccactctggagtcccttctcgcttctctggatccggaagtgggacggatttcactctgaccatcagcagtctgcagccagaagacttcgcaacttattactgtcaacagtatagcaccgtgccgtggacgtttggacagggtaccaaagtggaaataaaacgaggtaagcctatccctaaccctctcctcggtctcgattctacgtaagctagcttgactgactgagatacagcgtaccttcagctcacagacatgataagatacattgatgagtttggacaaaccacaactagaatgcagtgaaaaaaatgctttatttgtgaaatttgtgatgctattgctttatttgtaaccattataagctgcaataaacaagttaacaacaacaattgcattcattttatgtttcaggttcagggggaggtgtgggaggttttttaaagcaagtaaaacctctacaaatgtggtagtcgtcagctatcctgcaggaacttgtttatttgaaaatcaattcacaaaatccgagtagttattttgcctcccccttcccatttaacagaatacaccaatctctccccacgcacagctttaaacatttggataccattagatatagacatggttttagattccacattccaaacagtttcagagcgagccaatctggggtcagtgatagataaaaatccatcgggatagtcttttaaagcgctttcacagtccaactgctgcggatgcgactccggagtctggatcacggtcatctggaagaagaacgatgggaatcataatccgaaaacggtatcggacgattgtgtctcatcaaacccacaagcagccgctgtctgcgtcgctccgtgcgactgctgtttatgggatcagggtccacagtgtcctgaagcatgattttaatagcccttaacatcaactttctggtgcgatgcgcgcagcaacgcattctgatttcactcaaatctttgcagtaggtacaacacattattacaatattgtttaataaaccataattaaaagcgctccagccaaaactcatatctgatataatcgcccctgcatgaccatcataccaaagtttaatataaattaaatgacgttccctcaaaaacacactacccacatacatgatctcttttggcatgtgcatattaacaatctgtctgtaccatggacaacgttggttaatcatgcaacccaatataaccttccggaaccacactgccaacaccgctcccccagccatgcattgaagtgaaccctgctgattacaatgacaatgaagaacccaattctctcgaccgtgaatcacttgagaatgaaaaatatctatagtggcacaacatagacataaatgcatgcatcttctcataatttttaactcctcaggatttagaaacatatcccagggaataggaagctcttgcagaacagtaaagctggcagaacaaggaagaccacgaacacaacttacactatgcatagtcatagtatcacaatctggcaacagcgggtggtcttcagtcatagaagctcgggtttcattttcctcacaacgtggtaactgggctctggtgtaagggtgatgtctggcgcatgatgtcgagcgtgcgcgcaaccttgtcataatggagttgcttcctgacattctcgtattttgtatagcaaaacgcggccctggcagaacacactcttcttcgccttctatcctgccgcttagcgtgttccgtgtgatagttcaagtacaaccacactcttaagttggtcaaaagaatgctggcttcagttgtaatcaaaactccatcgcatctaatcgttctgaggaaatcatccaagcaatgcaactggattgtgtttcaagcaggagaggagagggaagagacggaagaaccatgttaatttttattccaaacgatctcgcagtacttcaaattgtagatcgcgcagatggcatctctcgcccccactgtgttggtgaaaaagcacagctagatcaaaagaaatgcgattttcaaggtgctcaacggtggcttccagcaaagcctccacgcgcacatccaagaacaaaagaataccaaaagaaggagcattttctaactcctcaatcatcatattacattcctgcaccattcccagataattttcagctttccagccttgaattattcgtgtcagttcttgtggtaaatccaatccacacattacaaacaggtcccggagggcgccctccaccaccattcttaaacacaccctcataatgacaaaatatcttgctcctgtgtcacctgtagcgaattgagaatggcaacatcaattgacatgcccttggctctaagttcttctttaagttctagttgtaaaaactctctcatattatcaccaaactgcttagccagaagccccccgggaacaagagcaggggacgctacagtgcagtacaagcgcagacctccccaattggctccagcaaaaacaagattggaataagcatattgggaaccgccagtaatatcatcgaagttgctggaaatataatcaggcagagtttcttgtaaaaattgaataaaagaaaaatttgccaaaaaaacattcaaaacctctgggatgcaaatgcaataggttaccgcgctgcgctccaacattgttagttttgaattagtctgcaaaaataaaaaaaaaaacaagcgtcatatcatagtagcctgacgaacagatggataaatcagtctttccatcacaagacaagccacagggtctccagctcgaccctcgtaaaacctgtcatcatgattaaacaacagcaccgaaagttcctcgcggtgaccagcatgaataattcttgatgaagcatacaatccagacatgttagcatcagttaacgagaaaaaacagccaacatagcctttgggtataattatgcttaatcgtaagtatagcaaagccacccctcgcggatacaaagtaaaaggcacaggagaataaaaaatataattatttctctgctgctgttcaggcaacgtcgcccccggtccctctaaatacacatacaaagcctcatcagccatggcttaccagacaaagtacagcgggcacacaaagcacaagctctaaagtgactctccaacctctccacaatatatatatacacaagccctaaactgacgtaatgggagtaaagtgtaaaaaatcccgccaaacccaacacacaccccgaaactgcgtcaccagggaaaagtacagtttcacttccgcaatcccaacaggcgtaacttcctctttctcacggtacgtgatatcccactaacttgcaacgtcattttcccacggtcgcaccgccccttttagccgttaaccccacagccaatcaccacacgatccacactttttaaaatcacctcatttacatattggcaccattccatctataaggtatattatatagataga

SEQ ID NO: 70 - protein, 125 aa, Artificial Sequence
  anti-CTLA-4 VH chain amino acid sequence.
QVQLVESGGGVVQPGRSLRLSCAASGFTFSSYGMHWVRQAPGKGLEWVAVIWYDGSNKYYADSVKGRFTISRDNSKNTLYLQMNSLRAEDTAVYYCARDPRGATLYYYYYGMDVWGQGTTVTVSS

SEQ ID NO: 71 - protein, 108 aa, Artificial Sequence
  anti-CTLA-4 VL chain amino acid sequence
DIQMTQSPSSLSASVGDRVTITCRASQSINSYLDWYQQKPGKAPKLLIYAASSLQSGVPSRFSGSGSGTDFTLTISSLQPEDFATYYCQQYYSTPFTFGPGTKVEIKR

SEQ ID NO: 72 - DNA, 33464 bp, Artificial Sequence
  NG-257 virus genome sequence comprising the EnAd genome with a transgene cassette encoding an anti-VEGF ScFv inserted into the region Bx
tctatctatataatataccttatagatggaatggtgccaatatgtaaatgaggtgattttaaaaagtgtggatcgtgtggtgattggctgtggggttaacggctaaaaggggcggtgcgaccgtgggaaaatgacgttttgtgggggtggagtttttttgcaagttgtcgcgggaaatgtgacgcataaaaaggcttttttctcacggaactacttagttttcccacggtatttaacaggaaatgaggtagttttgaccggatgcaagtgaaaattgttgattttcgcgcgaaaactgaatgaggaagtgtttttctgaataatgtggtatttatggcagggtggagtatttgttcagggccaggtagactttgacccattacgtggaggtttcgattaccgtgttttttacctgaatttccgcgtaccgtgtcaaagtcttctgtttttacgtaggtgtcagctgatcgctagggtatttatacctcagggtttgtgtcaagaggccactcttgagtgccagcgagaagagttttctcctctgcgccggcagtttaataataaaaaaatgagagatttgcgatttctgcctcaggaaataatctctgctgagactggaaatgaaatattggagcttgtggtgcacgccctgatgggagacgatccggagccacctgtgcagctttttgagcctcctacgcttcaggaactgtatgatttagaggtagagggatcggaggattctaatgaggaagctgtaaatggcttttttaccgattctatgcttttagctgctaatgaagggttagaattagatccgcctttggacacttttgatactccaggggtaattgtggaaagcggtacaggtgtaagaaaattacctgatttgagttccgtggactgtgatttgcactgctatgaagacgggtttcctccgagtgatgaggaggaccatgaaaaggagcagtccatgcagactgcagcgggtgagggagtgaaggctgccaatgttggttttcagttggattgcccggagcttcctggacatggctgtaagtcttgtgaatttcacaggaaaaatactggagtaaaggaactgttatgttcgctttgttatatgagaacgcactgccactttatttacagtaagtgtgtttaagttaaaatttaaaggaatatgctgtttttcacatgtatattgagtgtgagttttgtgcttcttattataggtcctgtgtctgatgctgatgaatcaccatctcctgattctactacctcacctcctgagattcaagcacctgttcctgtggacgtgcgcaagcccattcctgtgaagcttaagcctgggaaacgtccagcagtggaaaaacttgaggacttgttacagggtggggacggacctttggacttgagtacacggaaacgtccaagacaataagtgttccatatccgtgtttacttaaggtgacgtcaatatttgtgtgacagtgcaatgtaataaaaatatgttaactgttcactggtttttattgctttttgggcggggactcaggtatataagtagaagcagacctgtgtggttagctcataggagctggctttcatccatggaggtttgggccattttggaagaccttaggaagactaggcaactgttagagaacgcttcggacggagtctccggtttttggagattctggttcgctagtgaattagctagggtagtttttaggataaaacaggactataaacaagaatttgaaaagttgttggtagattgcccaggactttttgaagctcttaatttgggccatcaggttcactttaaagaaaaagttttatcagttttagacttttcaaccccaggtagaactgctgctgctgtggcttttcttacttttatattagataaatggatcccgcagactcatttcagcaggggatacgttttggatttcatagccacagcattgtggagaacatggaaggttcgcaagatgaggacaatcttaggttactggccagtgcagcctttgggtgtagcgggaatcctgaggcatccaccggtcatgccagcggttctggaggaggaacagcaagaggacaacccgagagccggcctggaccctccagtggaggaggcggagtagctgacttgtctcctgaactgcaacgggtgcttactggatctacgtccactggacgggataggggcgttaagagggagagggcatctagtggtactgatgctagatctgagttggctttaagtttaatgagtcgcagacgtcctgaaaccatttggtggcatgaggttcagaaagagggaagggatgaagtttctgtattgcaggagaaatattcactggaacaggtgaaaacatgttggttggagcctgaggatgattgggaggtggccattaaaaattatgccaagatagctttgaggcctgataaacagtataagattactagacggattaatatccggaatgcttgttacatatctggaaatggggctgaggtggtaatagatactcaagacaaggcagttattagatgctgcatgatggatatgtggcctggggtagtcggtatggaagcagtaacttttgtaaatgttaagtttaggggagatggttataatggaatagtgtttatggccaataccaaacttatattgcatggttgtagcttttttggtttcaacaatacctgtgtagatgcctggggacaggttagtgtacggggatgtagtttctatgcgtgttggattgccacagctggcagaaccaagagtcaattgtctctgaagaaatgcatatttcaaagatgtaacctgggcattctgaatgaaggcgaagcaagggtccgccactgcgcttctacagatactggatgttttattttgattaagggaaatgccagcgtaaagcataacatgatttgcggtgcttccgatgagaggccttatcaaatgctcacttgtgctggtgggcattgtaatatgctggctactgtgcatattgtttcccatcaacgcaaaaaatggcctgtttttgatcacaatgtgatgacgaagtgtaccatgcatgcaggtgggcgtagaggaatgtttatgccttaccagtgtaacatgaatcatgtgaaagtgttgttggaaccagatgccttttccagaatgagcctaacaggaatttttgacatgaacatgcaaatctggaagatcctgaggtatgatgatacgagatcgagggtacgcgcatgcgaatgcggaggcaagcatgccaggttccagccggtgtgtgtagatgtgactgaagatctcagaccggatcatttggttattgcccgcactggagcagagttcggatccagtggagaagaaactgactaaggtgagtattgggaaaactttggggtgggattttcagatggacagattgagtaaaaatttgttttttctgtcttgcagctgtcatgagtggaaacgcttcttttaaggggggagtcttcagcccttatctgacagggcgtctcccatcctgggcaggagttcgtcagaatgttatgggatctactgtggatggaagacccgtccaacccgccaattcttcaacgctgacctatgctactttaagttcttcacctttggacgcagctgcagctgccgccgccgcttctgttgccgctaacactgtgcttggaatgggttactatggaagcatcatggctaattccacttcctctaataacccttctaccctgactcaggacaagttacttgtccttttggcccagctggaggctttgacccaacgtctgggtgaactttctcagcaggtggtcgagttgcgagtacaaactgagtctgctgtcggcacggcaaagtctaaataaaaaaatcccagaatcaatgaataaataaacaagcttgttgttgatttaaaatcaagtgtttttatttcatttttcgcgcacggtatgccctagaccaccgatctctatcattgagaactcggtggattttttccaggatcctatagaggtgggattgaatgtttagatacatgggcattaggccgtctttggggtggagatagctccattgaagggattcatgctccggggtagtgttgtaaatcacccagtcataacaaggtcgcagtgcatggtgttgcacaatatcttttagaagtaggctgattgccacagataagcccttggtgtaggtgtttacaaaccggttgagctgggatgggtgcattcggggtgaaattatgtgcattttggattggatttttaagttggcaatattgccgccaagatcccgtcttgggttcatgttatgaaggaccaccaagacggtgtatccggtacatttaggaaatttatcgtgcagcttggatggaaaagcgtggaaaaatttggagacacccttgtgtcctccaagattttccatgcactcatccatgataatagcaatggggccgtgggcagcggcgcgggcaaacacgttccgtgggtctgacacatcatagttatgttcctgagttaaatcatcataagccattttaatgaatttggggcggagagtaccagattggggtatgaatgttccttcgggccccggagcatagttcccctcacagatttgcatttcccaagctttcagttccgagggtggaatcatgtccacctggggggctatgaaaaacaccgtttctggggcgggggtgattaattgtgatgatagcaaatttctgagcaattgagatttgccacatccggtggggccataaatgattccgattacgggttgcaggtggtagtttagggaacggcaactgccgtcttctcgaagcaagggggccacctcgttcatcatttcccttacatgcatattttcccgcaccaaatccattaggaggcgctctcctcctagtgatagaagttcttgtagtgaggaaaagtttttcagcggtttcagaccgtcagccatgggcattttggagagagtttgctgcaaaagttctagtctgttccacagttcagtgatgtgttctatggcatctcgatccagcagacctcctcgtttcgcgggtttggacggctcctggaatagggtatgagacgatgggcgtccagcgctgccagggttcggtccttccagggtctcagtgttcgagtcagggttgtttccgtcacagtgaaggggtgtgcgcctgcttgggcgcttgccagggtgcgcttcagactcatcctgctggtcgaaaacttctgtcgcttggcgccctgtatgtcggccaagtagcagtttaccatgagttcgtagttgagcgcctcggctgcgtggcctttggcgcggagcttacctttggaagttttcttgcataccgggcagtataggcatttcagcgcatacaacttgggcgcaaggaaaacggattctggggagtatgcatctgcgccgcaggaggcgcaaacagtttcacattccaccagccaggttaaatccggttcattggggtcaaaaacaagttttccgccatattttttgatgcgtttcttacctttggtctccatgagttcgtgtcctcgttgagtgacaaacaggctgtccgtgtccccgtagactgattttacaggcctcttctccagtggagtgcctcggtcttcttcgtacaggaactctgaccactctgatacaaaggcgcgcgtccaggccagcacaaaggaggctatgtgggaggggtagcgatcgttgtcaaccagggggtccaccttttccaaagtatgcaaacacatgtcaccctcttcaacatccaggaatgtgattggcttgtaggtgtatttcacgtgacctggggtccccgctgggggggtataaaagggggcggttctttgctcttcctcactgtcttccggatcgctgtccaggaacgtcagctgttggggtaggtattccctctcgaaggcgggcatgacctctgcactcaggttgtcagtttctaagaacgaggaggatttgatattgacagtgccggttgagatgcctttcatgaggttttcgtccatctggtcagaaaacacaatttttttattgtcaagtttggtggcaaatgatccatacagggcgttggataaaagtttggcaatggatcgcatggtttggttcttttccttgtccgcgcgctctttggcggcgatgttgagttggacatactcgcgtgccaggcacttccattcggggaagatagttgttaattcatctggcacgattctcacttgccaccctcgattatgcaaggtaattaaatccacactggtggccacctcgcctcgaaggggttcattggtccaacagagcctacctcctttcctagaacagaaagggggaagtgggtctagcataagttcatcgggagggtctgcatccatggtaaagattcccggaagtaaatccttatcaaaatagctgatgggagtggggtcatctaaggccatttgccattctcgagctgccagtgcgcgctcatatgggttaaggggactgccccatggcatgggatgggtgagtgcagaggcatacatgccacagatgtcatagacgtagatgggatcctcaaagatgcctatgtaggttggatagcatcgcccccctctgatacttgctcgcacatagtcatatagttcatgtgatggcgctagcagccccggacccaagttggtgcgattgggtttttctgttctgtagacgatctggcgaaagatggcgtgagaattggaagagatggtgggtctttgaaaaatgttgaaatgggcatgaggtagacctacagagtctctgacaaagtgggcataagattcttgaagcttggttaccagttcggcggtgacaagtacgtctagggcgcagtagtcaagtgtttcttgaatgatgtcataacctggttggtttttcttttcccacagttcgcggttgagaaggtattcttcgcgatccttccagtactcttctagcggaaacccgtctttgtctgcacggtaagatcctagcatgtagaactgattaactgccttgtaagggcagcagcccttctctacgggtagagagtatgcttgagcagcttttcgtagcgaagcgtgagtaagggcaaaggtgtctctgaccatgactttgaggaattggtatttgaagtcgatgtcgtcacaggctccctgttcccagagttggaagtctacccgtttcttgtaggcggggttgggcaaagcgaaagtaacatcattgaagagaatcttgccggccctgggcatgaaattgcgagtgatgcgaaaaggctgtggtacttccgctcggttattgataacctgggcagctaggacgatctcgtcgaaaccgttgatgttgtgtcctacgatgtataattctatgaaacgcggcgtgcctctgacgtgaggtagcttactgagctcatcaaaggttaggtctgtggggtcagataaggcgtagtgttcgagagcccattcgtgcaggtgaggattcgctttaaggaaggaggaccagaggtccactgccagtgctgtttgtaactggtcccggtactgacgaaaatgccgtccgactgccattttttctggggtgacgcaatagaaggtttgggggtcctgccgccagcgatcccacttgagttttatggcgaggtcataggcgatgttgacgagccgctggtctccagagagtttcatgaccagcatgaaggggattagctgcttgccaaaggaccccatccaggtgtaggtttccacatcgtaggtgagaaagagcctttctgtgcgaggatgagagccaatcgggaagaactggatctcctgccaccagttggaggaatggctgttgatgtgatggaagtagaactccctgcgacgcgccgagcattcatgcttgtgcttgtacagacggccgcagtagtcgcagcgttgcacgggttgtatctcgtgaatgagttgtacctggcttcccttgacgagaaatttcagtgggaagccgaggcctggcgattgtatctcgtgctttactatgttgtctgcatcggcctgttcatcttctgtctcgatggtggtcatgctgacgagccctcgcgggaggcaagtccagacctcggcgcggcaggggcggagctcgaggacgagagcgcgcaggctggagctgtccagggtcctgagacgctgcggactcaggttagtaggcagtgtcaggagattaacttgcatgatcttttggagggcgtgcgggaggttcagatagtacttgatctcaacgggtccgttggtggagatgtcgatggcttgcagggttccgtgtcccttgggcgctaccaccgtgcccttgtttttcattttggacggcggtggctctgttgcttcttgcatgtttagaagcggtgtcgagggcgcgcaccgggcggcaggggcggctcgggacccggcggcatggctggcagtggtacgtcggcgccgcgcgcgggtaggttctggtactgcgccctgagaagactcgcatgcgcgacgacgcggcggttgacatcctggatctgacgcctctgggtgaaagctaccggccccgtgagcttgaacctgaaagagagttcaacagaatcaatctcggtatcgttgacggcggcttgcctaaggatttcttgcacgtcaccagagttgtcctggtaggcgatctccgccatgaactgctcgatctcttcctcttgaagatctccgcggcccgctctctcgacggtggccgcgaggtcgttggagatgcgcccaatgagttgagagaatgcattcatgcccgcctcgttccagacgcggctgtagaccacggcccccacgggatctctcgcgcgcatgaccacctgggcgaggttgagctccacgtggcgggtgaagaccgcatagttgcataggcgctggaaaaggtagttgagtgtggtggcgatgtgctcggtgacgaagaaatacatgatccatcgtctcagcggcatctcgctgacatcgcccagagcttccaagcgctccatggcctcgtagaagtccacggcaaaattaaaaaactgggagtttcgcgcggacacggtcaactcctcttccagaagacggataagttcggcgatggtggtgcgcacctcgcgctcgaaagcccctgggatttcttcctcaatctcttcttcttccactaacatctcttcctcttcaggtggggctgcaggaggagggggaacgcggcgacgccggcggcgcacgggcagacggtcgatgaatctttcaatgacctctccgcggcggcggcgcatggtttcagtgacggcgcggccgttctcgcgcggtcgcagagtaaaaacaccgccgcgcatctccttaaagtggtgactgggaggttctccgtttgggagggagagggcgctgattatacattttattaattggcccgtagggactgcacgcagagatctgatcgtgtcaagatccacgggatctgaaaacctttcgacgaaagcgtctaaccagtcacagtcacaaggtaggctgagtacggcttcttgtgggcgggggtggttatgtgttcggtctgggtcttctgtttcttcttcatctcgggaaggtgagacgatgctgctggtgatgaaattaaagtaggcagttctaagacggcggatggtggcgaggagcaccaggtctttgggtccggcttgctggatacgcaggcgattggccattccccaagcattatcctgacatctagcaagatctttgtagtagtcttgcatgagccgttctacgggcacttcttcctcacccgttctgccatgcatacgtgtgagtccaaatccgcgcattggttgtaccagtgccaagtcagctacgactctttcggcgaggatggcttgctgtacttgggtaagggtggcttgaaagtcatcaaaatccacaaagcggtggtaagctcctgtattaatggtgtaagcacagttggccatgactgaccagttaactgtctggtgaccagggcgcacgagctcggtgtatttaaggcgcgaataggcgcgggtgtcaaagatgtaatcgttgcaggtgcgcaccagatactggtaccctataagaaaatgcggcggtggttggcggtagagaggccatcgttctgtagctggagcgccaggggcgaggtcttccaacataaggcggtgatagccgtagatgtacctggacatccaggtgattcctgcggcggtagtagaagcccgaggaaactcgcgtacgcggttccaaatgttgcgtagcggcatgaagtagttcattgtaggcacggtttgaccagtgaggcgcgcgcagtcattgatgctctatagacacggagaaaatgaaagcgttcagcgactcgactccgtagcctggaggaacgtgaacgggttgggtcgcggtgtaccccggttcgagacttgtactcgagccggccggagccgcggctaacgtggtattggcactcccgtctcgacccagcctacaaaaatccaggatacggaatcgagtcgttttgctggtttccgaatggcagggaagtgagtcctattttttttttttgccgctcagatgcatcccgtgctgcgacagatgcgcccccaacaacagcccccctcgcagcagcagcagcagcaatcacaaaaggctgtccctgcaactactgcaactgccgccgtgagcggtgcgggacagcccgcctatgatctggacttggaagagggcgaaggactggcacgtctaggtgcgccttcacccgagcggcatccgcgagttcaactgaaaaaagattctcgcgaggcgtatgtgccccaacagaacctatttagagacagaagcggcgaggagccggaggagatgcgagcttcccgctttaacgcgggtcgtgagctgcgtcacggtttggaccgaagacgagtgttgcgggacgaggatttcgaagttgatgaaatgacagggatcagtcctgccagggcacacgtggctgcagccaaccttgtatcggcttacgagcagacagtaaaggaagagcgtaacttccaaaagtcttttaataatcatgtgcgaaccctgattgcccgcgaagaagttacccttggtttgatgcatttgtgggatttgatggaagctatcattcagaaccctactagcaaacctctgaccgcccagctgtttctggtggtgcaacacagcagagacaatgaggctttcagagaggcgctgctgaacatcaccgaacccgaggggagatggttgtatgatcttatcaacattctacagagtatcatagtgcaggagcggagcctgggcctggccgagaaggtggctgccatcaattactcggttttgagcttgggaaaatattacgctcgcaaaatctacaagactccatacgttcccatagacaaggaggtgaagatagatgggttctacatgcgcatgacgctcaaggtcttgaccctgagcgatgatcttggggtgtatcgcaatgacagaatgcatcgcgcggttagcgccagcaggaggcgcgagttaagcgacagggaactgatgcacagtttgcaaagagctctgactggagctggaaccgagggtgagaattacttcgacatgggagctgacttgcagtggcagcctagtcgcagggctctgagcgccgcgacggcaggatgtgagcttccttacatagaagaggcggatgaaggcgaggaggaagagggcgagtacttggaagactgatggcacaacccgtgttttttgctagatggaacagcaagcaccggatcccgcaatgcgggcggcgctgcagagccagccgtccggcattaactcctcggacgattggacccaggccatgcaacgtatcatggcgttgacgactcgcaaccccgaagcctttagacagcaaccccaggccaaccgtctatcggccatcatggaagctgtagtgccttcccgctctaatcccactcatgagaaggtcctggccatcgtgaacgcgttggtggagaacaaagctattcgtccagatgaggccggactggtatacaacgctctcttagaacgcgtggctcgctacaacagtagcaatgtgcaaaccaatttggaccgtatgataacagatgtacgcgaagccgtgtctcagcgcgaaaggttccagcgtgatgccaacctgggttcgctggtggcgttaaatgctttcttgagtactcagcctgctaatgtgccgcgtggtcaacaggattatactaactttttaagtgctttgagactgatggtatcagaagtacctcagagcgaagtgtatcagtccggtcctgattacttctttcagactagcagacagggcttgcagacggtaaatctgagccaagcttttaaaaaccttaaaggtttgtggggagtgcatgccccggtaggagaaagagcaaccgtgtctagcttgttaactccgaactcccgcctattattactgttggtagctcctttcaccgacagcggtagcatcgaccgtaattcctatttgggttacctactaaacctgtatcgcgaagccatagggcaaagtcaggtggacgagcagacctatcaagaaattacccaagtcagtcgcgctttgggacaggaagacactggcagtttggaagccactctgaacttcttgcttaccaatcggtctcaaaagatccctcctcaatatgctcttactgcggaggaggagaggatccttagatatgtgcagcagagcgtgggattgtttctgatgcaagagggggcaactccgactgcagcactggacatgacagcgcgaaatatggagcccagcatgtatgccagtaaccgacctttcattaacaaactgctggactacttgcacagagctgccgctatgaactctgattatttcaccaatgccatcttaaacccgcactggctgcccccacctggtttctacacgggcgaatatgacatgcccgaccctaatgacggatttctgtgggacgacgtggacagcgatgttttttcacctctttctgatcatcgcacgtggaaaaaggaaggcggcgatagaatgcattcttctgcatcgctgtccggggtcatgggtgctaccgcggctgagcccgagtctgcaagtccttttcctagtctacccttttctctacacagtgtacgtagcagcgaagtgggtagaataagtcgcccgagtttaatgggcgaagaggagtatctaaacgattccttgctcagaccggcaagagaaaaaaatttcccaaacaatggaatagaaagtttggtggataaaatgagtagatggaagacttatgctcaggatcacagagacgagcctgggatcatggggattacaagtagagcgagccgtagacgccagcgccatgacagacagaggggtcttgtgtgggacgatgaggattcggccgatgatagcagcgtgctggacttgggtgggagaggaaggggcaacccgtttgctcatttgcgccctcgcttgggtggtatgttgtaaaaaaaaataaaaaaaaaactcaccaaggccatggcgacgagcgtacgttcgttcttctttattatctgtgtctagtataatgaggcgagtcgtgctaggcggagcggtggtgtatccggagggtcctcctccttcgtacgagagcgtgatgcagcagcagcaggcgacggcggtgatgcaatccccactggaggctccctttgtgcctccgcgatacctggcacctacggagggcagaaacagcattcgttattcggaactggcacctcagtacgataccaccaggttgtatctggtggacaacaagtcggcggacattgcttctctgaactatcagaatgaccacagcaacttcttgaccacggtggtgcaaaacaatgactttacccctacggaagccagcacccagaccattaactttgatgaacgatcgcggtggggcggtcagctaaagaccatcatgcatactaacatgccaaacgtgaacgagtatatgtttagtaacaagttcaaagcgcgtgtgatggtgtccagaaaacctcccgacggtgctgcagttggggatacttatgatcacaagcaggatattttgaaatatgagtggttcgagtttactttgccagaaggcaacttttcagttactatgactattgatttgatgaacaatgccatcatagataattacttgaaagtgggtagacagaatggagtgcttgaaagtgacattggtgttaagttcgacaccaggaacttcaagctgggatgggatcccgaaaccaagttgatcatgcctggagtgtatacgtatgaagccttccatcctgacattgtcttactgcctggctgcggagtggattttaccgagagtcgtttgagcaaccttcttggtatcagaaaaaaacagccatttcaagagggttttaagattttgtatgaagatttagaaggtggtaatattccggccctcttggatgtagatgcctatgagaacagtaagaaagaacaaaaagccaaaatagaagctgctacagctgctgcagaagctaaggcaaacatagttgccagcgactctacaagggttgctaacgctggagaggtcagaggagacaattttgcgccaacacctgttccgactgcagaatcattattggccgatgtgtctgaaggaacggacgtgaaactcactattcaacctgtagaaaaagatagtaagaatagaagctataatgtgttggaagacaaaatcaacacagcctatcgcagttggtatctttcgtacaattatggcgatcccgaaaaaggagtgcgttcctggacattgctcaccacctcagatgtcacctgcggagcagagcaggtctactggtcgcttccagacatgatgaaggatcctgtcactttccgctccactagacaagtcagtaactaccctgtggtgggtgcagagcttatgcccgtcttctcaaagagcttctacaacgaacaagctgtgtactcccagcagctccgccagtccacctcgcttacgcacgtcttcaaccgctttcctgagaaccagattttaatccgtccgccggcgcccaccattaccaccgtcagtgaaaacgttcctgctctcacagatcacgggaccctgccgttgcgcagcagtatccggggagtccaacgtgtgaccgttactgacgccagacgccgcacctgtccctacgtgtacaaggcactgggcatagtcgcaccgcgcgtcctttcaagccgcactttctaaaaaaaaaaaaaatgtccattcttatctcgcccagtaataacaccggttggggtctgcgcgctccaagcaagatgtacggaggcgcacgcaaacgttctacccaacatcctgtccgtgttcgcggacattttcgcgctccatggggcgccctcaagggccgcactcgcgttcgaaccaccgtcgatgatgtaatcgatcaggtggttgccgacgcccgtaattatactcctactgcgcctacatctactgtggatgcagttattgacagtgtagtggctgacgctcgcaactatgctcgacgtaagagccggcgaaggcgcattgccagacgccaccgagctaccactgccatgcgagccgcaagagctctgctacgaagagctagacgcgtggggcgaagagccatgcttagggcggccagacgtgcagcttcgggcgccagcgccggcaggtcccgcaggcaagcagccgctgtcgcagcggcgactattgccgacatggcccaatcgcgaagaggcaatgtatactgggtgcgtgacgctgccaccggtcaacgtgtacccgtgcgcacccgtccccctcgcacttagaagatactgagcagtctccgatgttgtgtcccagcggcgaggatgtccaagcgcaaatacaaggaagaaatgctgcaggttatcgcacctgaagtctacggccaaccgttgaaggatgaaaaaaaaccccgcaaaatcaagcgggttaaaaaggacaaaaaagaagaggaagatggcgatgatgggctggcggagtttgtgcgcgagtttgccccacggcgacgcgtgcaatggcgtgggcgcaaagttcgacatgtgttgagacctggaacttcggtggtctttacacccggcgagcgttcaagcgctacttttaagcgttcctatgatgaggtgtacggggatgatgatattcttgagcaggcggctgaccgattaggcgagtttgcttatggcaagcgtagtagaataacttccaaggatgagacagtgtcgatacccttggatcatggaaatcccacccctagtcttaaaccggtcactttgcagcaagtgttacccgtaactccgcgaacaggtgttaaacgcgaaggtgaagatttgtatcccactatgcaactgatggtacccaaacgccagaagttggaggacgttttggagaaagtaaaagtggatccagatattcaacctgaggttaaagtgagacccattaagcaggtagcgcctggtctgggggtacaaactgtagacattaagattcccactgaaagtatggaagtgcaaactgaacccgcaaagcctactgccacctccactgaagtgcaaacggatccatggatgcccatgcctattacaactgacgccgccggtcccactcgaagatcccgacgaaagtacggtccagcaagtctgttgatgcccaattatgttgtacacccatctattattcctactcctggttaccgaggcactcgctactatcgcagccgaaacagtacctcccgccgtcgccgcaagacacctgcaaatcgcagtcgtcgccgtagacgcacaagcaaaccgactcccggcgccctggtgcggcaagtgtaccgcaatggtagtgcggaacctttgacactgccgcgtgcgcgttaccatccgagtatcatcacttaatcaatgttgccgctgcctccttgcagatatggccctcacttgtcgccttcgcgttcccatcactggttaccgaggaagaaactcgcgccgtagaagagggatgttgggacgcggaatgcgacgctacaggcgacggcgtgctatccgcaagcaattgcggggtggttttttaccagccttaattccaattatcgctgctgcaattggcgcgataccaggcatagcttccgtggcggttcaggcctcgcaacgacattgacattggaaaaaaacgtataaataaaaaaaaaaaaatacaatggactctgacactcctggtcctgtgactatgttttcttagagatggaagacatcaatttttcatccttggctccgcgacacggcacgaagccgtacatgggcacctggagcgacatcggcacgagccaactgaacgggggcgccttcaattggagcagtatctggagcgggcttaaaaattttggctcaaccataaaaacatacgggaacaaagcttggaacagcagtacaggacaggcgcttagaaataaacttaaagaccagaacttccaacaaaaagtagtcgatgggatagcttccggcatcaatggagtggtagatttggctaaccaggctgtgcagaaaaagataaacagtcgtttggacccgccgccagcaaccccaggtgaaatgcaagtggaggaagaaattcctccgccagaaaaacgaggcgacaagcgtccgcgtcccgatttggaagagacgctggtgacgcgcgtagatgaaccgccttcttatgaggaagcaacgaagcttggaatgcccaccactagaccgatagccccaatggccaccggggtgatgaaaccttctcagttgcatcgacccgtcaccttggatttgccccctccccctgctgctactgctgtacccgcttctaagcctgtcgctgccccgaaaccagtcgccgtagccaggtcacgtcccgggggcgctcctcgtccaaatgcgcactggcaaaatactctgaacagcatcgtgggtctaggcgtgcaaagtgtaaaacgccgtcgctgcttttaattaaatatggagtagcgcttaacttgcctatctgtgtatatgtgtcattacacgccgtcacagcagcagaggaaaaaaggaagaggtcgtgcgtcgacgctgagttactttcaagatggccaccccatcgatgctgccccaatgggcatacatgcacatcgccggacaggatgcttcggagtacctgagtccgggtctggtgcagttcgcccgcgccacagacacctacttcaatctgggaaataagtttagaaatcccaccgtagcgccgacccacgatgtgaccaccgaccgtagccagcggctcatgttgcgcttcgtgcccgttgaccgggaggacaatacatactcttacaaagtgcggtacaccctggccgtgggcgacaacagagtgctggatatggccagcacgttctttgacattaggggtgtgttggacagaggtcccagtttcaaaccctattctggtacggcttacaactccctggctcctaaaggcgctccaaatacatctcagtggattgcagaaggtgtaaaaaatacaactggtgaggaacacgtaacagaagaggaaaccaatactactacttacacttttggcaatgctcctgtaaaagctgaagctgaaattacaaaagaaggactcccagtaggtttggaagtttcagatgaagaaagtaaaccgatttatgctgataaaacatatcagccagaacctcagctgggagatgaaacttggactgaccttgatggaaaaaccgaaaagtatggaggcagggctctcaaacccgatactaagatgaaaccatgctacgggtcctttgccaaacctactaatgtgaaaggcggtcaggcaaaacaaaaaacaacggagcagccaaatcagaaagtcgaatatgatatcgacatggagttttttgatgcggcatcgcagaaaacaaacttaagtcctaaaattgtcatgtatgcagaaaatgtaaatttggaaactccagacactcatgtagtgtacaaacctggaacagaagacacaagttccgaagctaatttgggacaacaatctatgcccaacagacccaactacattggcttcagagataactttattggacttatgtactataacagtactggtaacatgggggtgctggctggtcaagcgtctcagttaaatgcagtggttgacttgcaggacagaaacacagaactttcttaccaactcttgcttgactctctgggcgacagaaccagatactttagcatgtggaatcaggctgtggacagttatgatcctgatgtacgtgttattgaaaatcatggtgtggaagatgaacttcccaactactgttttccactggacggcataggtgttccaacaaccagttacaaatcaatagttccaaatggagacaatgcgcctaattggaaggaacctgaagtaaatggaacaagtgagatcggacagggtaatttgtttgccatggaaattaaccttcaagccaatctatggcgaagtttcctttattccaatgtggctctatatctcccagactcgtacaaatacaccccgtccaatgtcactcttccagaaaacaaaaacacctacgactacatgaacgggcgggtggtgccgccatctctagtagacacctatgtgaacattggtgccaggtggtctctggatgccatggacaatgtcaacccattcaaccaccaccgtaacgctggcttgcgttaccgatccatgcttctgggtaacggacgttatgtgcctttccacatacaagtgcctcaaaaattcttcgctgttaaaaacctgctgcttctcccaggctcctacacttatgagtggaactttaggaaggatgtgaacatggttctacagagttccctcggtaacgacctgcgggtagatggcgccagcatcagtttcacgagcatcaacctctatgctacttttttccccatggctcacaacaccgcttccacccttgaagccatgctgcggaatgacaccaatgatcagtcattcaacgactacctatctgcagctaacatgctctaccccattcctgccaatgcaaccaatattcccatttccattccttctcgcaactgggcggctttcagaggctggtcatttaccagactgaaaaccaaagaaactccctctttggggtctggatttgacccctactttgtctattctggttctattccctacctggatggtaccttctacctgaaccacacttttaagaaggtttccatcatgtttgactcttcagtgagctggcctggaaatgacaggttactatctcctaacgaatttgaaataaagcgcactgtggatggcgaaggctacaacgtagcccaatgcaacatgaccaaagactggttcttggtacagatgctcgccaactacaacatcggctatcagggcttctacattccagaaggatacaaagatcgcatgtattcatttttcagaaacttccagcccatgagcaggcaggtggttgatgaggtcaattacaaagacttcaaggccgtcgccataccctaccaacacaacaactctggctttgtgggttacatggctccgaccatgcgccaaggtcaaccctatcccgctaactatccctatccactcattggaacaactgccgtaaatagtgttacgcagaaaaagttcttgtgtgacagaaccatgtggcgcataccgttctcgagcaacttcatgtctatgggggcccttacagacttgggacagaatatgctctatgccaactcagctcatgctctggacatgacctttgaggtggatcccatggatgagcccaccctgctttatcttctcttcgaagttttcgacgtggtcagagtgcatcagccacaccgcggcatcatcgaggcagtctacctgcgtacaccgttctcggccggtaacgctaccacgtaagaagcttcttgcttcttgcaaatagcagctgcaaccatggcctgcggatcccaaaacggctccagcgagcaagagctcagagccattgtccaagacctgggttgcggaccctattttttgggaacctacgataagcgcttcccggggttcatggcccccgataagctcgcctgtgccattgtaaatacggccggacgtgagacggggggagagcactggttggctttcggttggaacccacgttctaacacctgctacctttttgatccttttggattctcggatgatcgtctcaaacagatttaccagtttgaatatgagggtctcctgcgccgcagcgctcttgctaccaaggaccgctgtattacgctggaaaaatctacccagaccgtgcagggtccccgttctgccgcctgcggacttttctgctgcatgttccttcacgcctttgtgcactggcctgaccgtcccatggacggaaaccccaccatgaaattgctaactggagtgccaaacaacatgcttcattctcctaaagtccagcccaccctgtgtgacaatcaaaaagcactctaccattttcttaatacccattcgccttattttcgctcccatcgtacacacatcgaaagggccactgcgttcgaccgtatggatgttcaataatgactcatgtaaacaacgtgttcaataaacatcactttatttttttacatgtatcaaggctctgcattacttatttatttacaagtcgaatgggttctgacgagaatcagaatgacccgcaggcagtgatacgttgcggaactgatacttgggttgccacttgaattcgggaatcaccaacttgggaaccggtatatcgggcaggatgtcactccacagctttctggtcagctgcaaagctccaagcaggtcaggagccgaaatcttgaaatcacaattaggaccagtgctttgagcgcgagagttgcggtacaccggattgcagcactgaaacaccatcagcgacggatgtctcacgcttgccagcacggtgggatctgcaatcatgcccacatccagatcttcagcattggcaatgctgaacggggtcatcttgcaggtctgcctacccatggcgggcacccaattaggcttgtggttgcaatcgcagtgcagggggatcagtatcatcttggcctgatcctgtctgattcctggatacacggctctcatgaaagcatcatattgcttgaaagcctgctgggctttactaccctcggtataaaacatcccgcaggacctgctcgaaaactggttagctgcacagccggcatcattcacacagcagcgggcgtcattgttagctatttgcaccacacttctgccccagcggttttgggtgattttggttcgctcgggattctcctttaaggctcgttgtccgttctcgctggccacatccatctcgataatctgctccttctgaatcataatattgccatgcaggcacttcagcttgccctcataatcattgcagccatgaggccacaacgcacagcctgtacattcccaattatggtgggcgatctgagaaaaagaatgtatcattccctgcagaaatcttcccatcatcgtgctcagtgtcttgtgactagtgaaagttaactggatgcctcggtgctcctcgtttacgtactggtgacagatgcgcttgtattgttcgtgttgctcaggcattagtttaaaagaggttctaagttcgttatccagcctgtacttctccatcagcagacacatcacttccatgcctttctcccaagcagacaccaggggcaagctaatcggattcttaacagtgcaggcagcagctcctttagccagagggtcatctttagcgatcttctcaatgcttcttttgccatccttctcaacgatgcgcacgggcgggtagctgaaacccactgctacaagttgcgcctcttctctttcttcttcgctgtcttgactgatgtcttgcatggggatatgtttggtcttccttggcttctttttggggggtatcggaggaggaggactgtcgctccgttccggagacagggaggattgtgacgtttcgctcaccattaccaactgactgtcggtagaagaacctgaccccacacggcgacaggtgtttctcttcgggggcagaggtggaggcgattgcgaagggctgcggtccgacctggaaggcggatgactggcagaaccccttccgcgttcgggggtgtgctccctgtggcggtcgcttaactgatttccttcgcggctggccattgtgttctcctaggcagagaaacaacagacatggaaactcagccattgctgtcaacatcgccacgagtgccatcacatctcgtcctcagcgacgaggaaaaggagcagagcttaagcattccaccgcccagtcctgccaccacctctaccctagaagataaggaggtcgacgcatctcatgacatgcagaataaaaaagcgaaagagtctgagacagacatcgagcaagacccgggctatgtgacaccggtggaacacgaggaagagttgaaacgctttctagagagagaggatgaaaactgcccaaaacaacgagcagataactatcaccaagatgctggaaatagggatcagaacaccgactacctcatagggcttgacggggaagacgcgctccttaaacatctagcaagacagtcgctcatagtcaaggatgcattattggacagaactgaagtgcccatcagtgtggaagagctcagccgcgcctacgagcttaacctcttttcacctcgtactccccccaaacgtcagccaaacggcacctgcgagccaaatcctcgcttaaacttttatccagcttttgctgtgccagaagtactggctacctatcacatcttttttaaaaatcaaaaaattccagtctcctgccgcgctaatcgcacccgcgccgatgccctactcaatctgggacctggttcacgcttacctgatatagcttccttggaagaggttccaaagatcttcgagggtctgggcaataatgagactcgggccgcaaatgctctgcaaaagggagaaaatggcatggatgagcatcacagcgttctggtggaattggaaggcgataatgccagactcgcagtactcaagcgaagcatcgaggtcacacacttcgcatatcccgctgtcaacctgccccctaaagtcatgacggcggtcatggaccagttactcattaagcgcgcaagtcccctttcagaagacatgcatgacccagatgcctgtgatgagggtaaaccagtggtcagtgatgagcagctaacccgatggctgggcaccgactctcccagggatttggaagagcgtcgcaagcttatgatggccgtggtgctggttaccgtagaactagagtgtctccgacgtttctttaccgattcagaaaccttgcgcaaactcgaagagaatctgcactacacttttagacacggctttgtgcggcaggcatgcaagatatctaacgtggaactcaccaacctggtttcctacatgggtattctgcatgagaatcgcctaggacaaagcgtgctgcacagcaccctgaagggggaagcccgccgtgattacatccgcgattgtgtctatctgtacctgtgccacacgtggcaaaccggcatgggtgtatggcagcaatgtttagaagaacagaacttgaaagagcttgacaagctcttacagaaatctcttaaggttctgtggacagggttcgacgagcgcaccgtcgcttccgacctggcagacctcatcttcccagagcgtctcagggttactttgcgaaacggattgcctgactttatgagccagagcatgcttaacaattttcgctctttcatcctggaacgctccggtatcctgcccgccacctgctgcgcactgccctccgactttgtgcctctcacctaccgcgagtgccccccgccgctatggagtcactgctacctgttccgtctggccaactatctctcctaccactcggatgtgatcgaggatgtgagcggagacggcttgctggagtgtcactgccgctgcaatctgtgcacgccccaccggtccctagcttgcaacccccagttgatgagcgaaacccagataataggcacctttgaattgcaaggccccagcagccaaggcgatgggtcttctcctgggcaaagtttaaaactgaccccgggactgtggacctccgcctacttgcgcaagtttgctccggaagattaccacccctatgaaatcaagttctatgaggaccaatcacagcctccaaaggccgaactttcggcctgcgtcatcacccagggggcaattctggcccaattgcaagccatccaaaaatcccgccaagaatttctactgaaaaagggtaagggggtctaccttgacccccagaccggcgaggaactcaacacaaggttccctcaggatgtcccaacgacgagaaaacaagaagttgaaggtgcagccgccgcccccagaagatatggaggaagattgggacagtcaggcagaggaggcggaggaggacagtctggaggacagtctggaggaagacagtttggaggaggaaaacgaggaggcagaggaggtggaagaagtaaccgccgacaaacagttatcctcggctgcggagacaagcaacagcgctaccatctccgctccgagtcgaggaacccggcggcgtcccagcagtagatgggacgagaccggacgcttcccgaacccaaccagcgcttccaagaccggtaagaaggatcggcagggatacaagtcctggcgggggcataagaatgccatcatctcctgcttgcatgagtgcgggggcaacatatccttcacgcggcgctacttgctattccaccatggggtgaactttccgcgcaatgttttgcattactaccgtcacctccacagcccctactatagccagcaaatcccggcagtctcgacagataaagacagcggcggcgacctccaacagaaaaccagcagcggcagttagaaaatacacaacaagtgcagcaacaggaggattaaagattacagccaacgagccagcgcaaacccgagagttaagaaatcggatctttccaaccctgtatgccatcttccagcagagtcggggtcaagagcaggaactgaaaataaaaaaccgatctctgcgttcgctcaccagaagttgtttgtatcacaagagcgaagatcaacttcagcgcactctcgaggacgccgaggctctcttcaacaagtactgcgcgctgactcttaaagagtaggcagcgaccgcgcttattcaaaaaaggcgggaattacatcatcctcgacatgagtaaagaaattcccacgccttacatgtggagttatcaaccccaaatgggattggcggcaggcgcctcccaggactactccacccgcatgaattggctcagcgccgggccttctatgatttctcgagttaatgatatacgcgcctaccgaaaccaaatacttttggaacagtcagctcttaccaccacgccccgccaacaccttaatcccagaaattggcccgccgccctagtgtaccaggaaagtcccgctcccaccactgtattacttcctcgagacgcccaggccgaagtccaaatgactaatgcaggtgcgcagttagctggcggctccaccctatgtcgtcacaggcctcggcataatataaaacgcctgatgatcagaggccgaggtatccagctcaacgacgagtcggtgagctctccgcttggtctacgaccagacggaatctttcagattgccggctgcgggagatcttccttcacccctcgtcaggctgttctgactttggaaagttcgtcttcgcaaccccgctcgggcggaatcgggaccgttcaatttgtggaggagtttactccctctgtctacttcaaccccttctccggatctcctgggcattacccggacgagttcataccgaacttcgacgcgattagcgagtcagtggacggctacgattgatgtctggtgacgcggctgagctatctcggctgcgacatctagaccactgccgccgctttcgctgctttgcccgggaactcattgagttcatctacttcgaactccccaaggatcaccctcaaggtccggcccacggagtgcggatttctatcgaaggcaaaatagactctcgcctgcaacgaattttctcccagcggcccgtgctgatcgagcgagaccagggaaacaccacggtttccatctactgcatttgtaatcaccccggattgcatgaaagcctttgctgtcttatgtgtactgagtttaataaaaactgaattaagactctcctacggactgccgcttcttcaacccggattttacaaccagaagaacgaaacttttcctgtcgtccaggactctgttaacttcacctttcctactcacaaactagaagctcaacgactacaccgcttttccagaagcattttccctactaatactactttcaaaaccggaggtgagctccaaggtcttcctacagaaaacccttgggtggaagcgggccttgtagtgctaggaattcttgcgggtgggcttgtgattattctttgctacctatacacaccttgcttcactttcttagtggtgttgtggtattggtttaaaaaatggggcccatactagtcttgcttgttttactttcgcttttggaaccgggttctgccaattacgatccatgtctagacttcgacccagaaaactgcacacttacttttgcacccgacacaagccgcatctgtggagttcatcgcctctcttacgaacttggcccccaacgacaaaaatttacctgcatggtgggaatcaaccccatagttatcacccagcaaagtggagatactaagggttgcattcactgctcctgcgattccatcgagtgcacctacaccctgctgaagaccctatgcggcctaagagacctgctaccaatgaattaaaaaatgattaataaaaaatcacttactgcggccgctgctaatcctttctctcttcaggccaccatgggatggagctgtatcatcctcttcttggtagcaacagctacaggtgtccactccgaggttcagctggtggagtctggcggtggcctggtgcagccagggggctcactccgtttgtcctgtgcagcttctggctataccttcaccaactatggtatgaactgggtccgtcaggccccgggtaagggcctggaatgggttggatggattaacacctataccggtgaaccgacctatgctgcggatttcaaacgtcgttttactttttctctggacacctccaagagcacagcttacctgcagatgaacagcctgcgcgctgaggacactgccgtctattactgtgcaaagtacccgcactattatgggagcagccactggtatttcgacgtctggggtcaaggaaccctggtcaccgtctcctcgggtggcggtggctcgggcggtggtggatctggtggcggcggatctgatatccagatgacccagtccccgagctccctgtccgcctctgtgggcgatagggtcaccatcacctgcagcgcaagtcaggatattagcaactatttaaactggtatcaacagaaaccaggaaaagctccgaaagtcctgatttacttcacctcctctctccactctggagtcccttctcgcttctctggatccggttctgggacggatttcactctgaccatcagcagtctgcagccagaagacttcgcaacttattactgtcaacagtatagcaccgtgccgtggacgtttggacagggtaccaaggtggagatcaaacgacatcatcaccaccaccattaagctagcttgactgactgagatacagcgtaccttcagctcacagacatgataagatacattgatgagtttggacaaaccacaactagaatgcagtgaaaaaaatgctttatttgtgaaatttgtgatgctattgctttatttgtaaccattataagctgcaataaacaagttaacaacaacaattgcattcattttatgtttcaggttcagggggaggtgtgggaggttttttaaagcaagtaaaacctctacaaatgtgggccggcctgaaatcagcaataaggtctctgttgaaattttctcccagcagcacctcacttccctcttcccaactctggtattctaaaccccgttcagcggcatactttctccatactttaaaggggatgtcaaattttagctcctctcctgtacccacaatcttcatgtctttcttcccagatgaccaagagagtccggctcagtgactccttcaaccctgtctacccctatgaagatgaaagcacctcccaacacccctttataaacccagggtttatttccccaaatggcttcacacaaagcccaaacggagttcttactttaaaatgtttaaccccactaacaaccacaggcggatctctacagctaaaagtgggagggggacttacagtggatgacaccaacggttttttgaaagaaaacataagtgccaccacaccactcgttaagactggtcactctataggtttaccactaggagccggattgggaacgaatgaaaataaactttgtatcaaattaggacaaggacttacattcaattcaaacaacatttgcattgatgacaatattaacaccttatggacaggagtcaaccccaccgaagccaactgtcaaatcatgaactccagtgaatctaatgattgcaaattaattctaacactagttaaaactggagcactagtcactgcatttgtttatgttataggagtatctaacaattttaatatgctaactacacacagaaatataaattttactgcagagctgtttttcgattctactggtaatttactaactagactctcatccctcaaaactccacttaatcataaatcaggacaaaacatggctactggtgccattactaatgctaaaggtttcatgcccagcacgactgcctatcctttcaatgataattctagagaaaaagaaaactacatttacggaacttgttactacacagctagtgatcgcactgcttttcccattgacatatctgtcatgcttaaccgaagagcaataaatgacgagacatcatattgtattcgtataacttggtcctggaacacaggagatgccccagaggtgcaaacctctgctacaaccctagtcacctccccatttaccttttactacatcagagaagacgactgacaaataaagtttgcgatcgctaccctgcaggaacttgtttatttgaaaatcaattcacaaaatccgagtagttattttgcctcccccttcccatttaacagaatacaccaatctctccccacgcacagctttaaacatttggataccattagatatagacatggttttagattccacattccaaacagtttcagagcgagccaatctggggtcagtgatagataaaaatccatcgggatagtcttttaaagcgctttcacagtccaactgctgcggatgcgactccggagtctggatcacggtcatctggaagaagaacgatgggaatcataatccgaaaacggtatcggacgattgtgtctcatcaaacccacaagcagccgctgtctgcgtcgctccgtgcgactgctgtttatgggatcagggtccacagtgtcctgaagcatgattttaatagcccttaacatcaactttctggtgcgatgcgcgcagcaacgcattctgatttcactcaaatctttgcagtaggtacaacacattattacaatattgtttaataaaccataattaaaagcgctccagccaaaactcatatctgatataatcgcccctgcatgaccatcataccaaagtttaatataaattaaatgacgttccctcaaaaacacactacccacatacatgatctcttttggcatgtgcatattaacaatctgtctgtaccatggacaacgttggttaatcatgcaacccaatataaccttccggaaccacactgccaacaccgctcccccagccatgcattgaagtgaaccctgctgattacaatgacaatgaagaacccaattctctcgaccgtgaatcacttgagaatgaaaaatatctatagtggcacaacatagacataaatgcatgcatcttctcataatttttaactcctcaggatttagaaacatatcccagggaataggaagctcttgcagaacagtaaagctggcagaacaaggaagaccacgaacacaacttacactatgcatagtcatagtatcacaatctggcaacagcgggtggtcttcagtcatagaagctcgggtttcattttcctcacaacgtggtaactgggctctggtgtaagggtgatgtctggcgcatgatgtcgagcgtgcgcgcaaccttgtcataatggagttgcttcctgacattctcgtattttgtatagcaaaacgcggccctggcagaacacactcttcttcgccttctatcctgccgcttagcgtgttccgtgtgatagttcaagtacaaccacactcttaagttggtcaaaagaatgctggcttcagttgtaatcaaaactccatcgcatctaatcgttctgaggaaatcatccaagcaatgcaactggattgtgtttcaagcaggagaggagagggaagagacggaagaaccatgttaatttttattccaaacgatctcgcagtacttcaaattgtagatcgcgcagatggcatctctcgcccccactgtgttggtgaaaaagcacagctagatcaaaagaaatgcgattttcaaggtgctcaacggtggcttccagcaaagcctccacgcgcacatccaagaacaaaagaataccaaaagaaggagcattttctaactcctcaatcatcatattacattcctgcaccattcccagataattttcagctttccagccttgaattattcgtgtcagttcttgtggtaaatccaatccacacattacaaacaggtcccggagggcgccctccaccaccattcttaaacacaccctcataatgacaaaatatcttgctcctgtgtcacctgtagcgaattgagaatggcaacatcaattgacatgcccttggctctaagttcttctttaagttctagttgtaaaaactctctcatattatcaccaaactgcttagccagaagccccccgggaacaagagcaggggacgctacagtgcagtacaagcgcagacctccccaattggctccagcaaaaacaagattggaataagcatattgggaaccgccagtaatatcatcgaagttgctggaaatataatcaggcagagtttcttgtaaaaattgaataaaagaaaaatttgccaaaaaaacattcaaaacctctgggatgcaaatgcaataggttaccgcgctgcgctccaacattgttagttttgaattagtctgcaaaaataaaaaaaaaaacaagcgtcatatcatagtagcctgacgaacagatggataaatcagtctttccatcacaagacaagccacagggtctccagctcgaccctcgtaaaacctgtcatcatgattaaacaacagcaccgaaagttcctcgcggtgaccagcatgaataattcttgatgaagcatacaatccagacatgttagcatcagttaacgagaaaaaacagccaacatagcctttgggtataattatgcttaatcgtaagtatagcaaagccacccctcgcggatacaaagtaaaaggcacaggagaataaaaaatataattatttctctgctgctgttcaggcaacgtcgcccccggtccctctaaatacacatacaaagcctcatcagccatggcttaccagacaaagtacagcgggcacacaaagcacaagctctaaagtgactctccaacctctccacaatatatatatacacaagccctaaactgacgtaatgggagtaaagtgtaaaaaatcccgccaaacccaacacacaccccgaaactgcgtcaccagggaaaagtacagtttcacttccgcaatcccaacaggcgtaacttcctctttctcacggtacgtgatatcccactaacttgcaacgtcattttcccacggtcgcaccgccccttttagccgttaaccccacagccaatcaccacacgatccacactttttaaaatcacctcatttacatattggcaccattccatctataaggtatattatatagataga

SEQ ID NO: 73 - DNA, 33464 bp, Artificial Sequence; identical to SEQ ID NO: 72
  NG-281 virus genome sequence comprising the EnAd genome with a transgene cassette encoding an anti-VEGF ScFv inserted into the region Bx and a second transgene cassette encoding an anti-PD-L1 ScFv inserted into the region BY.

1. A continuous process for the manufacture of an adenovirus wherein the process comprises the steps:
A) continuously culturing, in a vessel, mammalian cells infected with the adenovirus in the presence of media suitable for supporting the cells such that the virus replicates, wherein the cells are capable of supporting viral replication, and
B) isolating from the media the virus produced from step A) wherein the isolation of virus is not subsequent to a cell lysis step,
wherein viable cells for virus infection and production are maintained in the vessel at a level suitable for replicating the virus for the period of continuous manufacture,
wherein the process comprises at least one media change or addition and at at least one time point post infection at least some of the cells are changed or cells are added.

2. A process according to claim 1, wherein the virus has a hexon and fibre from a group B adenovirus.

3. A process according to claim 1, wherein the virus is replication competent.

4. A process according to claim 1, wherein the continuous manufacturing period comprises at least two virus replication cycles.

5. A process according to claim 1, wherein each virus replication cycle is in the range of from 30 to 300 hours.

6. A process according to claim 1, wherein the process produces at least 50,000 virus particles per cell at one or more time points post infection.

7. A process according to claim 1, wherein viable cells for virus infection and production are maintained in the vessel at a level suitable for replicating the virus by the addition of cells to the culture.

8. A process according to claim 1, wherein cells are removed from the cultures at one or more time points post infection.

9. A process according to claim 1, wherein the mammalian cells are selected from the group comprising HEK, CHO, Hela, Vero, A549, PerC6 and GMK, in particular HEK293.

10. A process according to claim 1, wherein the multiplicity of infection is 5 to 50 vp/cell.

11. A process according to claim 1, wherein the cells are infected with a starting concentration of virus of 1-4×10⁶ vp/ml.

12. A process according to claim 1, wherein a perfusion culture is employed.

13. A process according to claim 1, wherein a suspension culture is employed.

14. A process according to claim 1, wherein an adhesion culture is employed.

15. A process according to claim 1, wherein the process further comprises a purification step, selected from a CsCl gradient, chromatography step such as ion-exchange chromatography in particular anion-exchange chromatography, and a combination thereof.

16. A process according to claim 1 which comprises at least one media change or addition.

17. A process according to claim 1, which further comprises formulating the virus in a buffer suitable for storage.

18. A process for the manufacture of an adenovirus comprises the steps:
a. culturing, in a vessel, mammalian cells infected with the adenovirus in the presence of media suitable for supporting the cells such that the virus replicates, wherein the cells are capable of supporting viral replication, wherein the starting seed density of the virus is in the range 1 to 2×10⁶ vp/ml (such as 1×10⁶ vp/ml) and the multiplicity of infection is in the range 5 to 20; and
b. performing a lysis step in the period 24 to 75 hours post virus infection to harvest the virus from the cells.

19. A process according to claim 18, wherein the virus is a group B virus.

20. A process according to claim 18, wherein the process comprises at least one media change or addition.

21. A process according to claim 18, wherein at at least one time point post infection at least some of the cells are changed or cells are added.

22. A virus or formulation obtained or obtainable from this process described in claim 1.
